United States Patent Application Publication US 2004/0265849 A1 - sequence listing, part 3

SEQ ID NO: 6784 - DNA, 47418 bp, Homo sapiens
ttactgtggagggctgtggctggcagctgtggctgtgatggtccagatggctgctctgtgtggggcacaggacatccaggataagttttcttctatcctcagccggggccaagaagcctatgagagactgctgtggaatggtgagttcggggagcctaagtagtcttaaggcagctgagaggacaccaggagccttatttttctcttcctcgactccaggccgctattacaactatgacagcagctctcggcctcagtctcgtagtgttatgtctgaccagtgtgctggacagtggttcctgaaggcctgtggcctaggagaaggagacactgaggtgagagaggaggaggagcagccagagagaaaaatgggttttccctggaggtgggaagtaagtatatgagaccatgttcctgcccttgcccctccaggtgtttcctacccaacatgtggtccgtgctctccaaactatctttgagctgaacgtccaggcctttgcaggaggggccatgggggctgtgaatgggatgcagccccatggtgtccctgataaatccagtgtgcagtctgatgaagtctgggtgggtgtggtctacgggctggcagctaccatgatccaagaggtaatgcactccttttcccatctctccaccatctgtatcctggcccagaaaacttcctcaaccaccaaatttcttcaaggcataacccaatgccatcttgtccgtctataaagcctcccatttttccctggtatgcattccagctcctgccttcaggcttctgtctgtgggtcatagttatctcctccacttgctgggagctccttgaaggcaaagactctactgcctccatctatccagtggaagtggctcttcagagggtgccaagttagtatgtatgactgtcatctctcccaacagggcctgacttgggagggcttccagacagctgaaggctgctaccgtaccgtgtgggagcgcctgggtctggccttccagaccccagaggcatactgccagcagcgagtgttccgctcactggcctacatgcggccactgagcatatgggccatgcagctagccctgcaacagcagcagcacaaaaaggcctcctggccaaaagtcaaacagggcacaggactaaggacagggcctatgtttggaccaaaggaagccatggcaaacctgagcccagagtgagccgtctgaactgtgggagggaagtgctaacagcccagcctccagcctggcctttcctccttcccctctgaacctcctgcaaccctgagccatcaggacaatcataccccttcccttctctccacccaattgtgccagtaaatgggggttgagggtgacctaggcagcattagaatcacttatttatttctttcctcacctgttccctgactgcgtgaaatgttcagggaggtcagttgatttccccaggtacattcatggtgtgacagacacatgggtacaaataaaagacccagaaagccattaagtgtggtgtgtttgagccctcagtcgtcctgacagggcacaggagctgcggccagcccttgcccaccgctttttatttggacacagatggggagccccccaggctcctgctgagaccccccacatatcctcatatctagcctgagtatctgtcctgcaaaatgacagaggggctaccagtaggaagccatcctcccttccttgtgagatttgcctgcagggggaggatgggacctcggcagagaggctctgagaagaggtcagggaatggccactccaggggaggctctgcactgggagcctgaggcatgtaatgcagcaggcaggaagtgttgccaggggcctggagtacacagtctgagccgtccaaccactggtgtgtgctgtctttcggcacttctgactgcagggcaggcagctccagctggtaagggtcctcactggggagggcacgaagctggcgggacaacactgaggagacaaagaatcttcagaggccaacccagacctctccccttgccctgtctgagagctatccttaagcctcttacctccatgctcagctggcaggctcccccttgtgtcagaggagtacatagcaggtacaaggaggaggcagaaggagactagtaggacctagagcacaggaaaaaggagatgaagaagggctctggattgccctgtccccaccaactgagaaaaggatttctcccctcatcaccatcctcaccaagatgcaggtgctgctgctgctggttttgtttgatatctcaatcaccatggcctggagtttcctcagttgatctagaagggacctagaggaagagaggggccaatagtgagcatcccctggcctagcatcctgagacacagtgaaactcctgttcaggccacctcctccatctctgcactggatcctctctcttacttttcattctatttttgcaaacgacttcttcctctctggacaaaatgcctgaagttcctcattaaaacaacaacaacaacaaaaagcaaaaacaaaacaaaacaaaaaaactctgccaggacttaacctcctttgcgaatatcatcagtcgttccccactgtctgatcagctatgcacataatcctcaccaggcattttctatgttctctaccttctgtcccagctcatgtgtgttaagagttccagcccaagatgactatgctggactagtcctcttgcctaggatgctttctctctgcctagaatgctttcccaacccaaccccagaatcctaactactatgaaagcccatgacgtctttcttaccccctttctttttcttggtacttaacttattcttagttacttgtaaatgtattcctcactactgggagcttcttggaatcagagacctagtgaaggcagctgcccagttagaaatcaagtgtagggcaggggaaagagtgagaaagcattaaatgaggggcataggaagggaatggtttggagggatacttacaaattctgttcctccagaagctgtactttgttctgaagctccatattctgggctgtgtatttcaagaccctgggggaaataacaaagatacggggatatggcctgtatcctcccttcaaaaacctaatacttacaacagagtccctctccctttcatacctgctctctaaacccccaacatacaccttctttttcctgcggctctcttgagcagatcttttatttcgaatcttcctccgcacacgtttcagaatttgttcctctgtctgaaaggaaacagggaaagggatatcattagaggaactctagaaaaaggagttgaaacgcaactgagatcaatctctttccaatacagaaatcccttctacagcttccctgaccaacaggcattcagattctttctgaatgcctccacggaccaggtgttaaccctaacaagccagaccattttaaactattaaaaaaaaaactggtcgggcagtattcaggcgacgtggctcatgcctgtaatcccaacactttggggagctaagacaggaggaccggttgagcccaggagtttgagaccagcctgagcaacatagtgagaccttgtctctactaaaaataaaaaattagccgggtgtggtggcacatgcctgtggtccctgctactcaggagactgaggaaggaggatcacttgagcctgagaggttgaagctgtagtgagccatgatctcgccactattctccaacctgggcaataaagcaagaacctgtcttcaaacaagcaaataaaaacttccttatcctgaaccaacagctgcctccttataatttctatccgttggacttacctagtatctctggggccaaatagaataaaccctgtttagctattttaaggcacttaacatttcctcagagcttaaagaaaaaaaaaaagacaaaatttttaactcatcttctcaggatagactgcatcctcttagtatctgtcaaagatgtgctctagccagtatcaaggaaagcaagagagtgacttgtagagacaataactctattgctacagtttccaaatcccatgaactttcttagtagccacatcacactgctgactcatcttgtactttgaagaaattaaaattcttcactttgggaggccaaggtgggtagatcacttgagcccaggagttcgagaccagcctggcaacaaggcaaaaccccatttctactaaaaataccaaaaaaaaaattgccgggcagggtagtgtgcacctgtagtctcagctactcgggaggctgaggtgggagaatcacctaagcccagaaagtcaaggctgcagtgagccatgatcacatcagtgcactccagcctgggcaacagagcaagaccttgtcaaaaaatatatatatattcctgtaacctttctattaatgagcactgatttcatcatagtaccccagtactctgcttgtgaagttgccactcattgcttaaaactgaaaactaaggattttacatttattcatgtactgcttagtccaaccctgttgaactctctaaacagttctaccattcagcaagaggtggattactatgaagccaacgaagtgtcaaggcccttcacttacacagtcctttccaaggcccaatactaatgttgcactgataattttgagttatttttttaacagaacaccaaaatttgtataagcccaacaaaaacgaggatctgcccttgcatctggcatattgtgtacctgcctcaacttcctattagcaataaatctactaagtttctcacctcaatccttttttaaagttattgatataaagttaacagaatttgcctacttgggacttttaatcccttttcagcctttgttcaaccaatgagagtcttaccttagtgagaggaagtgtctcaggcagaataagcccctccttctccaatagactcttctcctcatctgtcagtactagcctagcaatctcctagggtaacaagaaagtggacggcagttgcatggggatgtcagagaggaatggggaatcctgcccccacctggggaatgtgagagtaatctcctgaaaatcaagtcaagtacctgctctgccagctcctccatatgctgtggagtcatctgggtcccctcttttctacagctctcactctctgcaaaagggaaagtatgaatagccaggcccatgaaccctgtcctccccgcaaacttatttcagactcacctagatccatagagacagtttcccgtgggagggagtaggtgtggtcatggtggacaaggcaggggttggaggagctgagaatgttcaacgacgctgggggactcagcagggagcacagcaaatcatctacttcccagtcgctcggtacctgcgcagggttccaatgaacaggccttgaccttatcaccatcacctgacttcatggacatcccacgctttccccagtcagaaccccaacctacctcagaaagcggcagcgcccagtccagtggggccctcacggcctcatcgggtgccgtccccaaatcttcactttcctctagcaggaaggccagcaggtcttggtcaccagcatccaattccagctccatttgggacaactacggaaagggtgggccaccgggccccaacgtccgaagcccagacacgagccccaggccagctgtaggcctcgggcacctatccactgtccctctacggccgggattccccgccggcggctttccatagccctctccggacccgcctcccaggctcaattctcctcagcctccaacgcagcgaaagtgacgcaccccaccccgtggcactgtgggacttggagttccctccaactgagaagaggcttgggtgcagcgccacgtcccaggggctatgcaaatgtaggggacggccctgctgccgcctcgcaccccgagggcgggggttccggggctccggctccgccttctaccccaagctagaaaaaggaagagttctagcctgaaagggaactcgggcgtcgtcctggcgtcctctccggattgcgccgcaccctcgyttcctgccagggaggggctgccgggctttggcggctcccgagcatcgagaacggggccagagcagcttcctgcctgccccccgcgaccatagagcgcgggcccagggcgccgcccgcgggtgggggacgttcccaggacggaagtggccgagagagtgtcgaagggagggcgaggccggagcccgagggcgacccgagaagcggcggggcggcgggccggcgggcggggcgcagagccaggcagcgcaggtaggccagaccgggccgggcgggggccttagggtggggccgcggggcctggccccggggcgggcgggccctgcctctcttgcgtgtccggttcgggtcctattagttggagaggtcagcgtccagcgcatctcggcttgagctcggcgtgaagtaggccgtcttggggaagacaggcctttcctgggagcagtcctatgtctgggataggctttggggagcgtgaggagtcgggtggcagcggggcgcagggcggggacgggctttggtgttagctgatagcgggcatgtgggtaggaaagctttgggtgagttggggattaggtggggtccgtttaggaatcaagggtcgctataggagttaaaagctggggttaaaacttaagagttagtgkgagtcaggtccgttttagataggtaaggtttagattacggtcattatcttgtttgctgggatggccatcatacgtcataatttgagttcagggtcaggttaagggtcaacaacaggaatcaggttagagcttgtttgagggattaaagaatgttggcatggtcggtgttaaggataaacagtgaaagcgtgagttaggaatcaaattataaatgaactttaggcttaggggtcaacatttagggttaacatcaggggatttggtgctaaaggcaaaacttagatcagtttcagggatcagggattggatatgagtctgtgctaggaaagggatgaatgtccaagccggtactgggaatcaggaaacaaattagaggtggggttaatgttaggaatttggggcagctttaggggttgtggtttgaggctagcatagttgaccttgagcagataaaatttaagaggttggcagtaggtaaatgcccttcttttgtagggaaatcctttattcctatgtagttacaggggcttctttttacccagagagataaactaatttcaggctagcgttctggctttagctagaattgcaggcatctgggattccagcttctttattccattctctaagcccaaggcccttgctgtggccaccacagttaggggacaragattctggactgtgttgtttacagacaacataggtgggaaatagggacccaggatgtacaaggcctagtcacaagttggggactgcctagggaagaaggagctgatgactatgggggaagctaaccaaggaatcactgttgccatgggagaagggaataactgaatcccctgaaagtttagccctgcttctcccacttcacttgttctcttggtattaagccctcctctccaactctcatccctgactctgcatttcacacccatcctgcctatccccttacaaaatacttcccttgcctttaactctcccatgctcatcttatcatccgttcccatccttagttctacctccctcaccaacctttaatccgcacatcctacctgaatttaccctcatcaaaacctgagctttcccatcattttaaattactctcctaccattttcacccagtcatgtacctacattccacctggtcatctgctgaataccctactcccatcccctgctgtgtgtcaccccctggatctaagcctcttttaatttcttggaccatttgtagatccccttcccccactccccaacagaaaagaggaaacgagacccaaagaggaaactgggtcttgctgatcccacgcccagccaggccactgaccacacccccacttcactcccagcctgaccctgccactgaccacagcactatcctctactcagcctgacccagccactggctgtaccccatcccccatcccagctccagctttacttagacattgccaatgtcccttcactttcccacccccaccccagtctgatttagtgactgaccacaggcccagctcttctcaacctcctatagcctgacctggcctctgacctcaccccatcattccctgacttagccaccatccatgtaatcattccccttcccccaacctgatgcagtgactggtcatatatgtatcttatgtatatgtatttttccaaacaccatcatcaccagcattctttttctacaccctgtcttctcatcctttttctacaccctgtcttccccattcccagcctgatgcagtcactaacccaaccccatctgcccctagtggctactaatcatatactcataccctttttccccacagcctaaccacatcccgtaaccacagcctcatcctcacattctctgcccaacctgatcctttcccctcttcccaattcgtcgcctaaactcaagctgccccagccgctaaagtggctgctgatgataggaagctgtgggactctaacctgtctaccttagtagttattaggtcctgtcatttctacctccccaaacttgttctgagtgacatcttcctcaatgccattccaactccggcttcattacctttaatttgtactaatacagtgtccttctaactaatctccaaggtaactgccagagttatttttctaaaatccagttccggttatgtctcttctctgctcaaagactcccttggcttccttttgtcctccaataagtaaaattcctcatacccctctccagtcttcctctgcctttccatcctaaccctgacttccccaccactgctcccttgcaggtacccctgtgcttcaacagcctgcctgctcacttccctgaatgctcctccacgatttactgcttctccatctttgcttatgctatttctctgcctggagtgaaaactacccctgacacatctccagctggctggcgtagtggagaaagcttgggctttgcagtcagaaacctgggttcggatcctggcttcacaacttattatttggagaagtatttgaacaagtatttaacatctttgagtctgttttctgatctgtaaaaatggaaataatgacacctactgtaaggattaaatgaaattatgtatacaatgcaagtgacatagagtcaataaatggcagatcactattgttttttattatctctattttttaaaattctagcttcaaatgatacttatcatggagactttttggttccccttccctgacctaaagggatctctctgagcacacaccttttggctcttaccacatcctgccctccgttgtgattctgtacttggcttattcactcatctcgtggactgggagccctttgaactcaaaggctaggtcttactgatcttggtccccagccactgaaagtttggcccagggtcttccccacagctggccctcaaggaatgcttgctgggtgaatggagaatgtctacataatgggaggagagacactgggtgccgggtgtgcttgttatggaggttatctgtgcaaaagctgtgtgcataggatgggctccctaggagaagataatgcagtcgtgatgggatctgtgtgggggctgtgtgattgagataatgtgtgtatagagagagtaaggtagctttgtgggaaagagctctgcctaggctggggtgcatctggggagaatgagtgtgcatttgagtatggaggggctgtacygggggaagttctgtgcagcccttcagctagctgcccagtccagctctaaatgagtctccagcagcctgaggccggatatgtcagtctcacccacagccctcccccactgccagcggttgcggactcagaggccaaatttggtaacagactgagtgttactcccccatccctcttatattctgactgtcttaagctctttccttttgttcctgtctgtaactccctatctttctgcaattccccttgtgggtatctgctctgactatattctccaagtaccccaactttcttagctccaatactcttacattccattccttgctgggatttgacctcctgtcctccattccccccctccaattgcccaacttctttggaatgcatcgcaggaatgtattgagggaggaggagttccctgggagggggacacggcagtggggagttgctgttccatcaaacacaatggaaaagggakcaaagttctcaggccaaaggaggaatgagctagcttctactcatacttgtagcagccttgttctttgccaccaccacccacaattcactgatcagttcttcgcgtccacacaccctcttgtagctgtgtgaatatccactctggaccagctggggagtaagggtaggcatgactcagctcccttatcggggtctcaccagaggcttccgtgcttgaggaggaagggggtgtctaagtgtccrgaggaaatggggggagacatgcagtttcagcttagtgtgaagggtcctttcagtcctgcttcttggctccacagactcctccagcttctcggatccaccagcccagccctcattctttcatggtcagcaaccccatagccaggtctgtccagctgggacacaagcggatagtaataaggttgggcaaagtgccccaggagtggggagggggcagagagctggaactggggagactgggagggtcctctcttattggggagtaaagacagagagctgtggttcttctcttttgagactctggactgcttgtaaggtcagaaatggtctatctgccacttggtaccagaccgctgatctagaccattttcatacctgcctcctgtctcttgtttctacttagattttcaattctcctcatcccatctctcctaacttctttaccctctaccccttcttaacttccctggctttcaaatgccttctgtatcctaacacccccatctctgctttccagccttcccctctcaccctgcttttccccatttgaggcttgtagtttgccaggaggggaatgggcagcttgtatttgcccattctcttagttaagaggcacccaatccctgtaccaagcaggggcacatcagcagcagccgggcagacttgtcctcttgcagcctgtgcgccacctgctgcctccagtgcctcctctagcctgctgagagggggtgccaggagggtggaagaaggtggggtaggactagtattctgagctgcactgaaaatacagtcaggggaagtgggtgagacagagcagaattcgagacagacttgctgaagaggagaaagcatgggaggagttgcaggactgagtattaacttgatgacttggaacaagcaaggactgagttacagggactgggtcctttctctggcctgtcttgaaaatgtttcctggmctcccagagtctatttccccttctccaaaacacaagagttgaccagataacttctgagatagatccctttgagttagagaatcacatttctagcttgactgcctgggaagcccagtacagggctaggctccttcagaaggcccccgcatctcaggttagaaaaaagctggggcaagagcggacccctgaatggcttgagcaaccagtatttggtctccctgccaggctagctagagtttgtttgcaggcttcaagagccttagggaattataacatcttcattttgcagagaaggcagctaaagccatgagaaggaaggtcacgtggtgagaagagagctctgaaaatcccggacagggaagagccagcaggacacagcaggagacaaagagagaaaaatactgaaccaggcaaaaatgaaaasaaggcaggagtagggctgagaaaggtgatcagggacaaggggcaagagagatacttggatgaaagtagggaggtacaaattccagtggtggggcagggcagtgtcctcaggtagcactgcatttcagacctgctattgtaccttgcagaccagcttctcctttccctcagatgtcttaaattgttaggacttggccgggcgtggtggctcacgcctgtaatcccagcacttggggaggccaaggtggatcacgaggtcaggagatcgagaccatcctggctaacatggtgaaaccccgtctctactaaaaatacaaaaaattagccaggcatggcagcgggcgcctgtagtcccagctactggggaggctgagacaggagaatggcgtgaatccaggaggcggagcttgcarcgagctgagatcgcaccactgtactctagcctgggcaacagaacgaaactctgtctcaaaaaaaaaaattgtcaggactcattcttttgatgtaaataatttttcactctttaaaattattaaatacaatgaaaacaaccttattaccatctactttggtgagtccctttcaaaaacactcttcccttggactccaccatctggggggcctcttctcccaccagaagagtgtattctaatgccctgatgccatgggtcaggtatagccaggctggagaaaagaagctgccaccatggttgcactttcactgaagatcagcattgggaatgtggtgaagacgatgcagtttgagccgtctaccatggtgtacgacgcctgccgcatcattcgtgagcggatcccagaggccccagctggtcctcgtgagtctgactcccccggtggctggagtgggagtcttcagtcccttcttgttcccaggctctcggccttgagagttgacccctttgtcccctaagactactcacccctcaggtctgtgttccatggttccstcgttctttaggcccaaggtcatgggagaaatagtcaggggcaacatggtacaagctgttcagccacattggggtcttcataagcctaaagtgatccatcctctcttttagccagcgactttgggctctttctgtcagatgatgaccccaaaaagggtatatggctggaggctgggaaagctttggactactacatgctccgaaatggggtaagtatcctttcatcaaggaccaccacatccccttccatcagcttctccctgttccacctcctgttttcagcacccacatctgttgtctcttagccctccccatgctttcttcctattaacagacagtcataattccctgcttttgaacgaaccaccatagtcttcctttcagtgctccactctctcccctcgggctgtgtaaagaggaaataatacccctagctcagagtaggcccctgtctcttcttcctgccctaacaggacactatggagtacaggaagaaacagagacccctgaagatccgtatgctggatggaactgtgaagacgatcatggtggatgactctaagactgtcactgacatgctcatgaccatctgtgcccgcattggtaaggggccctagtacagttgaaagcctgggccagaaagcstcaactctctcaaaaggcatggatgcagtacctgggaagctaacaagccatctccttcctcaggcatcaccaatcatgatgaatattcattggttcgagagctgatggaagagaaaaaggaggaaataacagggaccttaagaaaggacaagacattgctgcgagatgaaaagaagatggagaaactaaagcagaaattgcacacagatgatgagtgtaagcagaactagaaaaaagagggcttttgaaatgggaagggtgggaaggggcttcagcatctgcttctgccaggcactgttttacaccctggggatacatcagtgagaaaacaaagtcytacactcatgggacttacatttaagtgaggggaggtaggaaatgcagaartaaacagagaccagacagcacaggggccatgggggtttggcactgaggggactgtctgtatcccagtgaactggctggaccatggtcggacactgagggagcagggtgtagaggagcacgagacgctgctgctgcggaggaagttcttttactcagaccagaatgtggattcccgggaccctgtacagctgaacctcctgtatgtgcaggtatgcagaggacttggctggggtggggcaggaatagggagggctcggaagcacagtgtgcgtgtccttgcacccacacacaacattcgcctccttgccctgtgctctccaggcacgagatgacatcctgaatggctcccaccctgtctcctttgacaaggcctgtgagtttgctggcttccaatgccagatccagtttgggccccacaatgagcagaagcacaaggctggcttccttgagtgagtgacccacatcctataccctgtcagggcccaggactccctgccattgtgaccccagtgggcctgtctccattccaagcctgccccccactatttcttcttccgaggtaccagggtttgaccaacatagctacccttttagttgccatcatccattgtctcttctctgcctctggaatatgaatgtagttcagtatctctgcccctacccccatctctgaagcaagcatgtcrctcttttttgagattatctgaagaattttgctgcagtagccagagggaaaccgggtaaaattttccctatagggaacatgggttaaaagtctcacaagcctcatctgctggtgtttcttggaatgcagagtttggcgtggctttctcagcttcctaagtgcatgttcatccttctagaaagctctttctcctcttggttccctgaaatggtgctctagacccactttccctcagggactgagcctctaacttaattttcctcagtccctttccctacagggagagacacaggtcacattaagaattcatactggccaggctcggtggctcacacctgtaatcccagcactttgggaggccagggcgggcagatcacctgaggtcgggagttcgagaccagcctgaccaacgtggagaaaccatgtatctctactaaaaatacaaaattagccaggcgtggtggcacatgcctgtaatmccagctactcgggaggctgaggcaggagaatcacttgaacctgggaggtggaggttttggtgagctgagatcgtgccattgcactccagcctgggcaacaagagtgaaactccatctcaaaaaaaaaaaagaagagtttacacgaagtcacctctatttcagaagataatctagactctattccctcagagtcttttttctccccaaagataacactgtcctaggtatttcctcatacccccaggcccacagttcatggcccacatgtcccctgatgctgtctaccacatgctgaccctcccttttctggtgtagcctgaaggacttcctgcccaaggagtatgtgaagcagaagggagagcgtaagatcttccaggtgaatgtgggtaggggaaagtatttgggatgaccgcggagctttgctgcttaatcttactgactaaatggccccctgcctcctccccgtctcccctaacttggctttcacccaccgggctgttatcccacctcacctctgccaagaaagcagacagcttgggcttttagtctcagctccatccctgcttttgctgtgcaattcagttcaatattcttgtaatcttttatttacctctgatttgggataacartacttgccccgtgtaggactgataggatcaaatgaggtagcataatctgaaattactgtgaaagagtatagtctttgtccactataaggtgttacccccactctgaatactcagcccagaaggccttctctttgcccttctacttccaaactctctgttcatatctccagaatgtctgcaagttccttgactgtatcccttgactcatcgcttctgcatagcccttatcagcctccatcccgttaccctctcgttctcatatcttgtactcctcaacctttccagtgtccccataattctctctcgktagagttagcatccarccttaattccttagctgtgatatgaaactctttgctaaattcttccccattttatgcacaggcacacaagaattgtgggcagatgagtgagattgaggccaaggtccgctacgtgaagctagcccgttctctcaagacttacggtgtctccttcttcctggtgaaggtaggttatgggcccttttcactgccctccttgtttcccactcttgcccttttctgtctctgaaagtctctggccttgccctcagtcacatctcccaccattccctaagattcccattctcttccttgctctgacctcatgaaaacctgcctgtcatcagccctacaccaccacttccctccctaccctgcattttcccttgtccgttagccctcccggccacctcaacatcccctatggctgcaagctgatctgatcattcacctctcatttgacctctgacctgtaacaccaacaccaacctctgcctcataggaaaaaatgaaagggaagaacaagctagtgcccaggcttctgggcatcaccaaggagtgtgtgatgcgagtggatgagaagaccaaggaagtgatccaggagtggaacctcaccaacatcaaacgctgggctgcgtctcccaaaagcttcaccctggtaagtctggggactataacaagaaagtgctttgggagtttcattaaaggggcagctgcagaggtctcttccctctcttggggtaagtatactgagtattactccagaaaaaaaggaggttagagtagatggagaatcttcctctgggagagtgtgaggcttaaatgaaacggatgatggacttattctttaaaatcagcagaacaaaaatctcatcagcaagctgagatcacaggaattcttgtaggtgtggtgaaaggaaaaatgtgataacctccctgtttcagcagcagctatatacagtgaatttttgactttatattatagggttatgaattgaaaactgatatcaacttgataaagtaccctaatgacacaaatacaaattataggaaatgctgttttttcccttttggatactacagccaaccttaaagtgtggccattttatgccaaatattatatcctctcaattttatcatcagagtaaaaataagagacttcctaaatgatatgtatttgaaactgtgtagtgtagaggccactcctcagaagtaaaaaatttccctccaaggagaaaataaagaggaggttcaagaaaggtgggcatcttccaagagggccgttgccacgggaaggcatctcatcagctcaaccttgggcctcccatcctagccatttccatsctggatagatttgagctttccctctgagtcccccacttgtcaccctaggattttggagattaccaagatggctattactcagtacagacaactgaaggggagcagattgcacagctcattgccggctacatcgatatcatcctgaagaaggtgagcactgcctrccctagccttctccttatcgcctcttgccctctccacaagccagtcctttagaaatgggcactcagattgcttgaacctgggaggcggaggttgcaatgagccgagatcttgcctctgcactccagcctgggtgacagagccctttcttgtcaaaaaaaaaaaaaaaagaaaaagaaatggacactcagcttctggaaaatggctggttatggaaagaagaggctgccttttctccacttccctcttctttaactatcccaactcttgttcctttttccttcctacagaaaaaaagcaaggatcactttgggctggaaggagatgaggagtctactatgctggaggactcagtgtcccccaaaaagtacgaagggagttgggctgatcccatttcccaggggtagagaaggcaaggcctgactctaaggactcttgggaggtggggagtccttagaatggttctttaactagttgcaggctgtagtgagacctcacacacctgcaaaggtagtgtaaccgggtgggacgggtagagatgaggagtcctctgtgagctcaatagttcacccctctacaggtcaacagtcctgcagcagcaatacaaccgggtggggaaagtggagcatggctctgtggccctgcctgccatcatgcgctctggagcctctggtcctgagaatttccaggtgggcagcatgccccctgcccagcagcagattaccagcggccagatgcaccgaggacacatgcctcctctggtaagtgtcccacttccaccacggtgccagggcccttctctcaccctcagctgggccgagccaggagttaggcagtcttttcccaggtccctattygtattctctccctagaccctggttctcttttacsttctcttttctccaaacatccattccagtccctgtttctccccacttgtctttagacttcagcccagcaggcactcactggaaccattaactccagcatgcaggccgtgcaggctgcccaggccaccctggatgactttgacactctgccgcctcttggccaggatgctgtaagtatgggatggaggagagkccggtggtactgaagctgagactccaagggatagggatgaggtgaaccaaaccagggcagatcctgaaggcttttcctctctctttcaggcctctaaggcctggcgtaaaaacaagatggatgaatcaaagcatgagatccactctcaggtagatgccatcacagctggtactgcgtctgtggtgaacctgacagcaggtaggccggatgctagcttccgggtgtgtgatggggagagggggtgcaagtgtgcacaggcatgcatgtgactggcttcatgtgtgactgtgccttgactcactgtggaagggactgtgtgtgtgcgtctttctgtggacatgtgtgtgactaactgggtgtgactttgctccctccccagcccttcgtctggcctgccctgtctctcatgttcctctttctccttttccccttaggggaccctgctgagacagactataccgcagtgggctgtgcagtcaccacaatctcctccaacctgacggagatgtcccgtggggtgaagctgctggctgccttgctggaggacgaaggcggcagtggtcggcccctgttgcaggcagcaaagggccttgcgggagcagtgtcagaactgctgcgcagtgcccaaccagccagtgctgaggtcaggggccacaggtttgggttagggtggagacagggttcaagcccaaggagaaggggcagtccaagccacaggatggaagcctgggtcccgtgggcctgtgatatgcacaggcatgtgggcagggattgggcagcttctgactggtgttcactctccacagccccgtcagaacctgctgcaagcagctgggaacgtgggccaggccagtggggagctgttgcaacaaattggggaaagtgatactgacccccacttccaggttggtgacttacccaaccccccagaaccccagaatctaggaagtaacttctgctcgtgaatccagttcctagtcctggcttctgtgaattgacccctaaaaaccaatctgaacctctatttccaggggatgatactagtaacttctgatctctcttttaggggttagaattcagaacccctgaatccaaacttaacctgctagtttactcttggccctcatttattctttagccccttgtcatcttttctctctcttccccgtacatagcccttgccccaatttgaggaccccccacaatgctatagaccatgccaccctgagaatagtgttcctctagctctcccccttcccgctccatgccaatttcctcagctgacttttcaccctggatttcccatgcagatatgtgcatccagaggggctggggttcgatctccccccgattcccctacggtaacagcctctggcctgggccttcccagctttgtcctctctgagccgcatacactcgtttctgtacttcttcctcagcctcctgggggaccagaacttggtgggagatgaggaggcctggcgaagccaggctttgggaaatgggatcaggtagggtagtacagggacttgctcccaagactccaggatgaccacttccaatccaagatcaagaagtggagtaaagaagctgggggtggasggatcccaggagatacctcctacctcctctccccaccccattgtaacagcgccaccacattgtctccccgtcatcatcgagtgtatccgcctcatgtgtgtctccatttggtgtaggctgtattttctcttggtgtgggtttgttcctcggtgggggttctgtcctgctgggtgctcagggcagtagctcggggtaggttctggttgcttctgcgtacactctcctttgattggatcagtgggaataatgaagcagcttacgcctctgagaagtgtctgtgaatcccaagcccaatctcaggtcatgctaactgctgttttctcacaggatgcgctaatgcagctcgccaaagctgtggcaagtgctgcagctgccctggtcctcaaggccaagagtgtggcccagcggacagaggactcgggacttcagacccaagttattgctgcagcaacacagtgtgccctatccacttcccaactagtggcctgtactaaggtgagccccaaaggttgctctagtccgtgctgaggggtaatactaccacacacacgtgagcctttcattttatttctttggctctggaggcctcctcacccatcccagttactgctatgagcagcatactctacctcctttcccttgcctacgtctctgacattcactttacctacaggtggtggcacctacaatcagctcacctgtctgccaagagcaactggtggaggctggacgactggtagccaaagccgtggagggctgtgtgtctgcctcccaggcagctacagaggatgggcaactgttgcgaggggtaggagcagcagccacagctgtcacccaggccytaaatgagctgctgcagcatgtgaaagcccatgccacaggggctgggcctgctggccgttatgaccaggctactgacaccatcctaaccgtcactgagaacatctttagctccatgggtgatgctggtaagacacgcacccccaggaaaacaaaaaaccctaccagggttccctaagcccactggacatcatccccttgcggacctaaccacttcaccccaaggaactcagcacagtgtgggcttgccagccacacaaccataggctcatcattaaagctctctgaaccctctgcttccccttctgtaaaaggaatattaagtcctctaccttccctggagcatttaaagaatataccaaagtacgcacaaaaatatatagaaagtgacatgaaagtggtatagccttccctactatacccctgaccccaaaagttttcagagagtgtctcatcttctcaaggctactggctgaaaatacccattggagactgtccttctcccgtaagaacccactggagaatctttttctccaagatcctaaacccagaaaaaaaatagcyccaaagaaatgatgcaagagcttttgccagtctctttttctgtccctaaagcccccatctaccttgtctacaccacttttccccacctttgtccccacccctgacacctcagtgtctctggcttcctcgcctgactgtgccctatgctctcaggggagatggtgcgacaggcccgcatcctggcccaagccacatctgacctggtcaatgccatcaaggctgatgctgagggggaaagtgatctggagaactcccgcaagctcttaagtgctgccaagatcctagctgatgccacagccaagatggtagaggctgccaaggtacaaagccttctgtgcacactcccagactggaccctagagggaagtagagcagtccagatggtcaccctcatctgatgagggagacccaggaaaagcagaaaacacaagaggacaaatataggagcactcaggaaatgaatgagccccaaggctgtgggtgagccatgacccargctttttttttttttttttttttaaagatgtggtctcactgtgttgcccaggctggtctcaaactcttggactcaagtgatcctcccaccttggcctcccgaagtgttaggattgcaggcatgagccaccacacctggcctaaarttattttttaattgacataattttacatattcatgaggtacatagtgacatttcaatacatgtatagtaatcagatcagagtaattaacatatccatcatttatccaaatatttatcatttctttgtgttgggaacattcagtatcctccccctagctatttggaactatataatagtcttaactttagtcatcctacagtggtgtagaacgctagaacttactcctatctagctataattttgtgtcctttaataaatctctcccattcctctgtagtaggcaaccagatcctttttctttaagtccaaggtcttaagtccaaggcctatttttaccttctttgctgctaccctgcctgggattcctttccttcctggtctcccctgtgaatacacataggcattcagtctctggggcctctgctgccagcaggacactgagacaccagcatgcagagaaccatcagaaagaagcccagatgattcctaggccccctggactctggggcttttcagttggcaggagtaagcaggtcccctgctttggtattcctgagatgcctgctctaaactgagtcctcctttgtccaggaagccctactcacctcactcgtgtggtattccccaaggaggggaagacaaaacaattccaccttaagaaaggatttcagcatccagtgggaatcctagccccctgaggtttcccattgaccttcatgagtcagctcctctcaaaggtgattgccttttggtggggctagttagagatgacttcaggaaaatacatgaattttaaactgagtctagaggagtgagagaggagcttctttaggatccacaggagagctgggtgatgactgtctttccacctctccctcagggagcagctgcccaccctgacagtgaggagcagcagcagcggctgcgggaggcagctgaggggctgcgcatggccaccaatgcagctgcgcagaatgccatcaagaaaaagctggtgcagcgcctggaggtgaggctgggagtttcaccaggagcaagagagagtgtgggtgctgtgggaggaatgaactgaaagggaggtgcggagagtaagttaatacgtccttgaggcataacctgggcaaggtaggccagggactgggctgggcatgggaatccatgggcttggtctgactactcttgtcttcacagcatgcagccaagcaggctgcagcctcagccacacagaccatcgctgcagctcagcacgcagcctctacccccaaggcctctgccggcccccagcccctgctggtgcagagctgcaaggtaagactctaggaaggatgtgggagtggaagagggagacttgtgggtctcttatgacawtttcacctacaggcagtggcagagcagattccactgctggtgcagggcgtccgaggaagccaagcccagcctgacagccccagcgctcagcttgccytcattgctgccagccagagcttcctgcaggcaaggcaccccctctgcacttctctgacctgaccttcccacctttctaagcttccatctcccacagtttgaatctctgccaagagcctctttcccaataccaagccccagtgttccctacatcctgaccatcatcagtccttgtacccaagcccagagggaggatggcacacttcatccacctgcctattccccaacagccaggtgggaagatggtggcagctgcaaaggcctcagtgccaacgattcaggaccaggcttcagccatgcagctgagtcagtgtgccaagaacctgggyacygcgctggctgaactccggacggctgcccagaaggtatggaagctggttctkgctttggaagatgaggctggagtcctgtgatgagaggaaatctgtgcagaataacccaatacgcagataattgtgtaatcagaggcattggtgagacacagcaggaccttctacacccaaaacccctttcttatcataggctcaggaagcatgtggacctttggagatggattctgcactgagtgtggtacagaatctagagaaagatctacaggaagtgaaggcagcagctcgagatggcaagcttaaacccttacctggggagacagtaagtatgtttaagacctcattcttactcaaatcctaaagtcttccttcacctccgtgccccagagctgctcaaaacctttccttccttcctttttcttttttctctttctctcttttatttttcttttctttcttcttccttccttttttctttctctttctctctccttccttctttcttccttcctttcttttcttcctttcctctcctctttcttttcttttctcttttcttttcttttccgttcttttatttctttttctttcttgatggagtctcgctctgtcacctaaactgtagtgcagttgtgcaatctcagctcactgcaacctctgcctcctgggttcaagccattctcctgcctcagcctcctgagtagctgggattacaggcatgcaccaccacgcctggctaatttttgtatttttagtagagatggggtttcgccatgttgcccaggctggtcttgaactcctgacctcaggtgatccacctgcctcagcctcccaacgtgctaggattataggtgggagccatcgcacccagcccaaaacatttatttaaattgccacctgtccccaagtaccttctcaggttccttctcctcaccttctcctttctcaagcccaattcttcccccttcatccttagatggagaagtgtacccaggacctgggcaacagcaccaaagccgtgagctcagccatcgcccagctactgggagaggttgcccagggcaatgagaattatgcaggtatgtgggcaragagccaggcatggggcatattgtgagggaggtaggaaaatgggagctggatgagggatgggactgacagacgaaaccactggaatcagggcctggcaatgaaagcaccttcccttccctctttctcctcatctcccaaggtattgcagctcgggatgtggcaggtgggctgcggtcactggcccaggccgctaggggagtcgctgcactgacgtcagatcctgcagtgcaggccattgtacttgatacggccagtgatgtgctggacaaggccagcagcctcattgaggaggcgaaaaaggcagctggccatccaggggaccctgagagccagcagcggcttgcccaggtcagataytgggaaagggccactccctctcccccaggttccttcataaggcccaccctgattgaggccaaagcttctgagcctcgtccacactcacagagtgatgtcttcttgggtctgctcttgacagcccctctgtggattccacccttatgttctcttagtcttttttttttttttttttttgagacagagttttgctcttactgcccaggctggagtgcaatggcgcaatttcggctcagtgcagtctccgcctcctgggttcaagtgattctcctgcctcagactccctagtagctgggactacaggcatgcgccaccacacccagctaatttttgaattttgttttagtagagacagggcttcaccatgttggccaggatggtctcgatctcttgacctcgtgatctgcccccctcggcctcccatagtgctgggattacaggcgtgagccactgtgcccggccctcttggtcttgtagaagtgtctcagttggattcagtcatgggctgagctaaacaccaagtttggggaagtttaattactgtcacttgaaaccctaacctcagcctgttcacctacaacgccccctttcttttttcactttcagaggcagtagagctagtcatctcccatgtcgcgtgaatggaggcgatctctcaaattcttttcacttgggcaaccctgtctcctttctcaccccaggtggctaaagcagtgacccaggctctgaaccgctgtgtcagctgcctacctggccagcgcgatgtggataatgccctgagggcagttggagatgccagcaagcgactcctgagtgactyggtaggaggacggtagggggtgggggaacgtaggagtcaaagaatgccaggcctctccttcctccctctcggttgtcctttgaccctgacttcccagatctgtcccctttcattactcccaggctatgtgcccaccttttcagccctcctttaccagacttctccctgcatcattccccactcttctgtctgacttmccctctcaccttgcagcttcctcctagcactgggacatttcaagaagctcagagccggttgaatgaagctgctgctgggctgaatcaggcagccacagaactggtgcaggcctctcggggaacccctcaggacctggctcgagcctcaggccgatttggacaggacttcagcaccttcctggaagctggtgtggagatggcaggccaggctcyggtatgaagaggcagagggtctggttgaatggttcccactaagggttagataggaggcagttgagtgaccagtcctgacttgctcctggctcccttccctccccagtctctagcactacttgagtgtctgggaaagaagatcccttttagagacagataagaaaggacaggacaatgcattgaccttrtcaccttcaacagagccaggaggaccgagcccaagttgtgtccaacttgaagggcatctccatgtcttcaagcaaacttcttctggctgccaaggccctgtccacggaccctgctgcccctaacctcaagagtcagctggctgcagctgccaggtaagtagttgctgagaagcccagccctggactgtgtgagagagactggggagcaggcagttcatgagagcttcttggcttaggaatggttataggcaaaagataaatacttacataggacccaggaatgatgacctattcaccttttcactcaactttctgtcactcccagggcagtaactgacagcatcaatcagctcatcactatgtgcacccagcaggcacccggccagaaggagtgtgataacgccctgcgggaattggaggtagacacatggcaggctgatggcattgaggttgagggaagtgttctggttttgggcctgagggaggtgtcttggatctcactttgccctccccctacacagacggtccgggaactcctggagaacccagtscagcccatcaatgacatgtcctactttggttgcctggacagtgtaatggagaactcaaaggtcagcacagccaggaactcggaggagagagggcagtaggatggagctaaccagatgctgccctggggttctgaggrcatgctctgactcccctgatgtcctctgttcctcaggtgctgggcgaggccatgactggcatctcccaaaatgccaagaacggaaacctgccagagtttggagatgccatttccacagcctcaaaggcactttgtggcttcaccgaggcagctgcacaggttattttcctgagatgggttctttgaatggcccctactttctttaccccatytyctctcagcctgacatacctgtagataaatcaagaagtttatgtttgcaaagccaactctatggaatctgggttgtcctcctcctgaagtggagacacttgtcagcaattactgaacaccagcagttctgatttctgtaattcctgaaccctggtactttggttaggattacactgcccaaccgtgaggccttttccagctggctttctcaaaatatactaattagcttatacaaactattttttcatgttattactactttctttttttttttttttttttttgagacagcgtttcgctctgtcgcccaggctgaagtgcaatggcgtgatctaggctcactgcaagctccgcctcccgggttcacgctagtctcctgcctcagccttccaagtagctgggactacaggcgctcaccaccacacccggctaattttttgtatttttttttttttttttagtaaagacagggtttcaccatgttagccaggatggtctcgatatcctgactcgtgatccacctgcctcggcctcccaaagtgctggaattacaggcgtgagccaccgcgcctggcctgtaatcactactttcttttttttttttttttttttttttttttgagaccgagtttcgctctgtcgcccaggctggagtgcagtggcgcgatctagactcactgcaagctccgcctcccgggttcacgccattctcctgcctcagcctcccgtgtagctgggactacaggcgcgcgccaccatgcccggctaatttttgtatttttagtagagacggggtttcaccgtgttagccaggatggtctcgatctcctgacctcgtgatccgcccgtctcgacctcccaaagtgctgggattacaggcgtgagccaccgcgcccggccaatcactactttcttaaaatagtactagtgacaaaatttccagtyacttgagttatcacttaactttgccttttcccacattatcaagtataaaactacctattagctgtaaagtattttgctttagtatatgaatccttaaaacaaactggcatcataagagttcacttcagactattttccctgaaagcctaccatcctagccctccatctccaccacctccctgtgccctgtcagaataggcgccttgctctagatggcttgtttgattttgtttttttgtttttttggttttttgtttgtttgttttttgagacggagtctcgctctgtcgccaggctggagtgcagaggcataatctcggctcactgcaacctccgcctcccgggttcaagtgattctcctacctcagcctcccgagtagctgggactacaggcgcctgccaccacacccgtctgatttttgtatttttagtagagacagggtttcactaaacctctttgttgtttgtttggtttttttccccccaccttctgaaaatgcatagaggaaaaagcaaagctactgtgtattgattgaagtatgaatcaaacattaggatgttctttccatcataaaaatggctttttaacccctcccttcctttccaaatatctgacgcatggaggtgctataaatgtgaattagcctaataaccttcatcagttttgaactgtctttaaaagaggctttgcttgtgtgcacaaaggtgtgtatttatatatggctctcaaackttttactgctacttacagtaagccatacttttcactctaagacccaacatacacaaacatatctaaatagagattggataaaaacccttgctatgtagttttcctttttattaacttttttaatcttctgaaatgcttgaatatacttaatgaaaacaggagagtattttttttcttctttatagtgtaaccattgtttgctaatgtatctccactcatggagaactctggaaaataagccctattctctaaacttacctctgctctcttttgtccctactatcactattcatttcccacctgcaatctttattcctcacccccacccccttttctcttcccaggctgcatatctggttggtgtctctgaccccaatagccaagctggacagcaagggctrgtggagcccacacagtttgcccgtgcaaaccaggcaattcagatggcctgccagagtttgggagagcctggctgtacccaggcccaggtaactcaagggaacagggaccacaggcgagtctgggaaagggcagaccgaccccgtggagtagagggaggtgaggcatgtgggaaagagggcagggacccatctctgaccttgcacacacagcttctttttgggtaactgtctttttctgccatgggtctcatcatttatcagttactgctaaattcacaacttctctgtagatgttcgagcttactctcccacatgccctcttatggtttctccattagtatgtctttcctctcccatgcccagttcatctttgggtatctctgtctcctagatcttgacttttcaggtgactctgttattcctgttttgactcctcagggtattgctctccatcccctgaccctaaaatggctcctccttgggtatgtacacctccttcctgccctcatcgtggctcttccatgtgtctcctcaggtgctctctgcagccaccattgtggctaaacacacctctgcactgtgtaacagctgtcgcctggcttctgcccgtaccaccaatcctactgccaagcgccagtttgtacagtcagccaaggaggtggccaacagcacagctaatcttgtcaagaccatcaaggttcccattgcttgaattcccagcctctccctgacctgtcctatcttctcycccgagtcccccagttattctctgaagccttctaccaaatcccctctgcctgagcccaagctctttctattcagactgaccacctagcctctccccaaatcctgtaagtcccaggaaggagacctggacttcacttcctataccccctatgactgcatcccaagtcctgagagcctctctgtcacttctaggcgctagatggggccttcacagaggagaaccgtgcccagtgccgagcagcaacagcccctctgctggaggctgtggacaatctgagtgcctttgcgtccaaccctgagttctccagcattcctgcccagatcagccctgaggtgaggygatgtgaagggggaactgatgggccagcttatyacctcatcttccagggactcctgagacttaccttcctgcctcccctctccccagggtcgggctgccatggagcccattgtgatctctgccaagacaatgttagagagtgccgggggactcatccagacagcccgggccctcgcagtcaatccccgggaccccccgagctggtcggtgctggccggccactcccgtactgtctcagactccatcaagaagctaattacaagcatgaggtattgagggatggrgaaccagtgtggctggggggcatacattgtggcagaatggaggatgggcacttgagtgcaatgagatgggatggtgttgggaggatacaggggaaggataggctggccttgcagtaggggatgttcttggtgttggagcccatgatgtgtctgcagggacaaggctccagggcagctggagtgtgaaacggccattgcagctctgaacagttgtctacgggacctagaccaggcttccctcgctgcagtcagccagcagcttgctccccgtgagggaatctctcaagaggtgagagggagagggttatatggaaagatrtgtctaggaagagaaatatcagactcaaagaagctgggggatcaaggagtggcttcttagggacatcaaaggctgggatgtgcgaaggagggttagggtatttggtatggacagaagagcagttctttgtagccagagggtcctattgcaggtcaccatcagggctaatgtccacttcctccccaggccttgcacactcagatgctcactgcagtccaagagatctcccatctcattgagccgctggccaatgctgcccgggctgaagcctcccagctgggacacaaggtacctatggagactcatgggaagtcccagggagtagggtgagagagaggggacctgacccctagtccaaccccttgcctcaggtgtcccagatggcgcagtactttgagccrctcaccctggctgcagtgggtgctgcctccaagaccctgagccacccgcagcagatggcactcctggaccagactaaaacattggcagagtctgccctgcagttgctatacactgccaaggaggctggtggtaacccaaaggtattgagggttgggagggaggagctgttactagcaggaggctggagaaacaggaacaacagagctcctctcctctccccacagcaagcagctcacacccaggaagccctggaggaggctgtgcagatgatgacygaggccgtagrggacctgacaacaaccctcaacgaggcagccagtgctgctggggtcgtgggtggcatggtggactccatcacccaggccatcaaccaggttagagtcttggggtgcctttggacactgaggctaccctgggccagagcctccaagcacagtggcagagaccctaacagtctttccctttccctatcctcccccctcagctagatgaaggaccaatgggtgaaccagaaggttccttcgtggattaccaaacaactatggtgcggacagccaaggccattgcagtgacygttcaggagatggtgagtttgggcgagtcccagaggactgccctcggagagctgactttggatataacttcactcgttccattatcaccaggttaccaagtcaaacaccagcccagaggagctgggccctcttgctaaccagctgaccagtgactatggccgtctggcctcggaggccaagcctgcagcggtggctgctgaaaatgaagaggtaaacgtggaggcaactctgccctgccccctgccccttgttcctgatgtgtcagtgtctagggctgtcccacccccaccctctctggtctttcatagaaaggggaacagcctcagggccactctgctgaagactagtgaggctctgggtagggacagaggatcaaagccttcagtcacaggtacaaagsaaacagctcagaatctggagccttcccgggcctgcctttctggcttctgccgaccctcatctgggcctacagctgcttctctgttgtgctgccagtccatgttcttgttctttcttgttgcaaactcatgaagctcttccttacctaagcctctagctttccaagaaagcaagtaattggatcttagcaggacacatgtaatgcccatccttaaaaccctccataaccccatacaggccacatggtaatccacggccctctgattcccacaytcaagcataaagtgctcctccccttctccccactgtgcttaacacaatcctcaccacttagtgcctgcgtgctactattttmtgtgtgtaggaggtgaccttctgcctaaaggatatgcaaccggaaacgtccttgtgctgggaaccttctctctctgcttctttagtctacaatgcatgtttttttctatgtccttagtgacttttccaagcacagtgaaggtaccctgagtgccccttgtaaaatccatctgtctttcccttggctcacagataggttcccatatcaaacaccgggtacaggagctgggccatggctgtgccgctctggtcaccaaggcaggcgccctgcagtgcagccccagtgatgcctacaccaagaaggagctcatagagtgtgcccggagagtctctgagaaggtgacggtgctcatccctgcagatggtgggactgcctccaaactctgtagcctttgccatcctcctccagccctctcagccctctcctgttgtcacttctcccaggcatgggcaacctttccatttcacatggcaccttccacagtcaccatgtgacattccctacccaggtctcccacgtcctggctgcgctccaggctgggaatcgtggcacccaggcctgcatcacagcagccagcrctgtgtctggtatcattgctgacctcgacaccaccatcatgttcgccactgctggcacgctcaatcgtgagggtactgaaactttcgctgaccaccggtaagacaggaactgggcctaagggaggcagacaggtcggggcacggggctggaagaggcaggatagcattcrctggaatggggaagacytggaccaggcaccttggacgggctggagcgggtaggggagatctgactaagctgggccctccctcagggagggcatcctgaagactgcraaggtgctggtggaggacaccaaggtcctggtgcaaaacgcagctgggagccaggagaagttggcgcaggctgcccagtcctccgtggcgaccatcacccgcctcgctgatgtggtcaagctgggtgcagccagcctgggagctgaggaccctgagacccaggtagtgacctgatgcccctaattccggctggaatcacttcctgtcccgcttcttcctcccatagaccagagccaacgctttcccacacaggtggtactaatcaacgcagtgaaagatgtagccaaagccctgggagacctcatcagtgcaacgaaggctgcagctggcaaagttggagatgaccctgctgtgtggcagctaaagaactctgccaaggttggagagaatgagagcaacatcaggaggggcactggattaacatacttcctcctgttccttaaaatcattcctcttcactcctctgatacctccaggtgatggtgaccaatgtgacatcattgcttaagacagtaaaagccgtggaagatgaggccaccaaaggcactcgggccctggaggcaaccacagaacacatacggcaggagctggcggtgagtgagagtctggggcatcagtgactagggtcagagagagggatcctgaaagcctgtgaacctgtgccacacatatactcacagctggagtcacacacagtcttctctctcatctatcgccagactttttttttgagaagggtcttgctctgtagccatcctcctccagccttctcagccctctcctcttgtcatttctcccaggtgtgggtgacctttccatttcacatggcatcttcctcagtcaccatgtgacttcccctaccccagctctcccacaccctccttctggagtgcagtggcgtgatctcagctcactacaacctccacctcccaggttcaagtgcttctcatgcctcagcctcctgagtcactgggaatacaggtgcataccatgctggctagtttttgtatttttagtagagatggggtttcaccatgttgaccaggctggtctcgaactcctggcctcaagtgatccacccgccttggcctcccaaagtgctgggattacactcatgagccactgtgccagtgagctacattcatgtctgtcccctacccacttgtttattccttagcatgtgacaactgtattttttcaccaccctcccactttctccagtcactagtggcctcttcttagttgctacattcagtggccacttcttggccttcatcctctttgaatatttcgaaagcatctgactgtgttaacaagcctctctttgaaattctttcttctgctgggcatggtggctcacgccagcactttgggaggccagcgggtgtaatcccagcactttgggaggctgaggcgggtggatcacaaggtcgggagttcgagaccagcctggccaatatggtgaaaccccgtctctactaaaaatacaaaaattagctgggcgtggtggcacgcgcctgtagtcccagctgcttgggaggctaaggcaggagaatcgctggaacccgggaggcagaggttgcagtgagccaagatggcgccactgcactccagcctgggcaacagagtgagactccatctcaaaaaaaaacaaaaaagaaaaaaaatgaaattctttcttcccttggcctagatactggcttttctcttgtttctcgaacgtcattgaatcacctttaacttagtaaatgtggaggccttcccagggttgtacaaatagtcttccttctctcttctcttctttggcaagtttaaccactttcattattattctgtaagaagcagacatccagttctgagttgagttattttcaactgcctgtttgacatcaccacctagatgcagtgcctccgaaccatgacatggtcctcctaatggtgggaacacccttgcagtcatgaagattccacctcagtcatctttgacttcaccatcttagccaccatatccaggctgttgccacgtcctttcattcctcctccctggttccctgtccgcactctggttcacacttccatactctcccgcaatttggctgtggcaccagttttctccctggtctccctgcttctggtccctgccactctcctctctccctactcatctttctaatttctaaatgcatctttctaaggttctgttttcacttttacttgaagatgtccaagttggaactcttgactttctgcctcccatacctggtcctttcctggtcttcccccatctcagtaaatggcacctcttagtaactcagttcctaaagccagaaacctagcttcaatatattagacttctctctttctctcattccccacatctaagttttgctagtgccccttccaaatacagctcattttttctttttatctcctaccactaccacactgtccaaaccatcatcagtccttaactggatttatgcagtagtctctatccagtcaccatgcttcaacacttgccccctccaatcctcctttgtacacagtagctaaaattatgtttttaaaatataaattagagtctggacatgctggctgatgcctgtaaaatcccagcgctttggaagactgagatgggaggatcacttgagtgagttcaagactagtctggacaacatagcaagatcctgtctctacaaaaaatttaaagattagctgggcaaggtggcccatgcctgtcccagttactcatgagtctgaaggcaggaggatcccttgagcccaggggttcaagtctgcagtgaactatgatcactccagtgcactccagcctgggtgacagagcaagaaatatatatatattagattatgtcacttcactacttaaaacccattagtgatggctctgcttgcttctccagtctcatcctactctcttcctttctgtgccccatccccctgcaccatcagttctgagaacatgccaagctcttatctkctgcaggctcttccactcagttctctccagctttttgaacactgtgctccttccagttcatcaggcttcagcctcaatgtcacctcctcagagagcccttccctgaccacctatttgaagtagttctcatcacagcactgtctctattctctcataatccaaatcacagtcctcagttttgctgcttgtttatttatttattacctgtgtccaaaaccagaatgtaagctccatgagaacagggagcatccctagccccttgcatagaatctgccacctagctgatctttaataaatgtttgcagattgaacccrtacatcaaaatrttttatgactttcacatattatgtaaaagtccaagttcctcggtgtgatattcaagtccccaataaccttttcttcaccattcctatattccagaacattccttgatactttccgatgtgacatcttggttgttcatgtcctaccatttacctaaaatgccctcctatcatctgtatatcttttatggcctagctctgcctctcaccccttcaaggcttctctctattttgggaatgaaaacccagccaaaagccacttttgtaattacttttgtgatttcaaacaaacaaacaaacaaactccccagttgcttcagtcagaaacaataaccaactgccttgttacattcactgtgatgtgtgaatgtctgcaccaaatcacatgcacacagagttctacgctgtctcatagtctcagccactgtaaaatctttcttcttcttctgcccccacaggttttctgttccccagagccacctgccaagacctctaccccagaagacttcatccgaatgaccaagggtatcaccatggcaaccgccaaggccgttgctgctggcaattcctgtcgccaggaagatgtcattgccacagccaatctgagccgccgtgctattgcagatatgcttcgggcttgcaaggtagaaatccttgaggcatttccgtgaggcagctttgrgccagaacatagtgggagagaaactgtagggatctgcggggcctaaagctaacatattactctggggacaggaagcagcttaccacccagaagtggcccctgatgtgcggcttcgagccctgcactatggccgggagtgtgccaatggctacctggaactgctggaccatgtactgctggtaagggagggcgttgcttgttcctcataccagcctccctgaatacacagccctcttcctgcaggcctcgcaccctgctgtctgttttgctcagatctcctccctaccccaccctctacttcccaaatctgttctcctttccaagtctccctttctcccaggccccatccttcttatcatctttggttctcccagtcacctcttcctcttcctctttttcttttctcctcccttcccacctgaccacccccttctctactttcgtcgtctcctctttcatctcatcattctccttgctccttgtcagccggtgagtgacacagccccactgtctctatcacgtgtgaggtgtgatgcatgatgtgtacttggataggcagcgtggagtttgagggctatggtgtggagtgctctagggataggggtgagggggccatggtctgccctatttcatagatcagggtagaccctaagatgtgatgctctttgtcccctgcccgcttcttgcccagaccctgcagaagccaagcccagaactgaagcagcagttgacaggacattcaaagcgtgtggctggttccgtcactgagctcatccaggctgctgaagccatgaagggtgaggggtgaccagggacagggacggatggaaaacccttatcatggtgtgatctctgcttcctggctggacagctctgtgctagcctctgaccatagtccccacagatgccagggcctgatgatactaaccatgctccctggtgcttttgacctccccactctgccttagcctctttcctcttccttcatcccaccaggaacagaatgggtagacccagaggaccccacagtcattgctgagaatgagctcctgggagctgcagccgccattgaggctgcagccaaaaagctagagcagctgaagccccgggccaaacccaaggtcagtcctgctcccttcctcttccaccctcaccatggcagtgtccccaccttcatctctgactttacatctctttctgcaaccttcgcttattgcaggaggcagatgagtccttgaactttgaggagcagatactagaagctgccaagtccattgcagcagccaccagtgcactggtaaaggctgcgtcggctgcccagagagaactagtggcccaagggaaggtgagtgcttaaatacccagaagaatggggacaggttggcactttgaygtccacatccacatccatagccagcgagtctttgaagtgaggaaaatgcaggtctaagtaggctcttctccttcctacaggtgggtgccattccagccaatgcactggacgatgggcagtggtcccagggcctcatttctgctgtaagtgtgcaataccactaggtctctctcagtttgagagacttgagaaggctggagtggggatggaccagggcaaggggcatatttttaagcaaactctccctgctttaggcccggatggtggctgcggccaccaacaatctgtgtgaggcagccaatgcagctgtacaaggccatgccagccaggagaagctcatctcatcagccaagcaggtagctgcctccacagcccagctccttgtggcctgcaaggtcaaggctgaccaggactcggaggcaatgaaacgacttcaggtgagaaccctgacccatcccattgtcccttgggctatactgcttcaaactgtcactcccgagatgtatgtttctatgagagaattgaggtactgtctcaactgggaccgtacctgagttctcaacctaggccactttctctctgcccaggctgctggcaacgcagtgaagcgagcctcagataatctggtgaaagcagcacagaaggctgcagcctttgaagagcaggagaatgagacagtggtggtgaaagagaagatggttggcggcattgcccaggtgagcttcaccccagatgctgagggacgctgtcaggagggcagtcatgttgcctgcgctggtcccaactaccctatgcccctgctgtgcatcctcactgaactaagtcccsgatctccaccctcagatcatcgcagcacaggaagaaatgcttcggaaggaacgagagctggaagaggcgcggaagaaactggcccagatccggcagcagcagtacaagtttctgccttcagagcttcgagatgagcactaaagaagcctcttctatttaatgcagacccggcccagagactgtgcgtgccactaccaaagccttctgggctgtcggggcccaacctgcccaaccccagcactccccaaagtgcctgccaaaccccagggcctggccccgcccagtcccgcagtacatcccctgtcccctccccaaccccmagtgccttcatgccctagggccccccaagtgcctgcccctccccagagtattaacgctccaagagtattattaacgctgctgtacctcgatctgaatctgccggggccccagcccactccaccctgccagcagcttccrgccagtccccacagcctcatcagctctcttcacygttttttgatactatcttcccccacccccagctacccataggggctgcagagttataagccccaaacaggtcatgctccaataaaaatgattctacctacaacctctgcctggcttcaagggagatacaagttttctcccagggcagtaggagagacagtggggttgaattctgtcacccagcttgatccagcttgaaatgggagaggggaagactggcagtctgcacctgaggtcccttcctccttgcacccggaccctaaagttatccaatggggaagttgtgcctgagaagtcatactcctgttatcctcacctccctggccagcacctaagcctcacaaagtgtcgttctkctgctgctgggacagcagctaccacagttccttgtggctaccaggacattctgttcttcatagctactcagggtatgtcaacaaatccagtccttgaccaaattcaaattttcaaaagaagctttgctaaaaataatatgcctgtaagtgtctgagcctaagagaactatggccacaaaactgattgaagccattagcaagcagaaaaatcccaacttgaggctgcctcgggtaggcaccgctcttgattgggttgggacactcctgcctagggtagcactaaaagtgaagagcttgacccaggtgtgagaatttattgttagagggggcagagctcccctagtggccaggaaggtgctagcagccctgttccagccaccctgcttatctggtgggtcagtggaaagaggcagtcagagaggtggatgctgtgtgcttccacgtccccatccagccactctgtccataatgcatggactctctgacagtcgtcttaggttggcaactattttcatgcgtgattctttagtcagccctaccgcccagtacattatttcctcaagtagaacacaaacgccacccatctgctactaacaccttctactcccaccacattagggaaagcttgaagtagatggaatgtagctggtaacggtggttcgagcctctaatcccagctacttaaaaggctgaggcaggaggactgcttgagaccaggagttcaaggctgcagtgagctatgatggtgccactgtgcaccagcctgggtgacggagtgagagcccttctctaagaaagtagatggaactctaggacagcccattagggatggtgccaacctcctaccatcactcctatcacctgtgattcattcattcaatatttactaagccatgcttgtgctaagcactggaaaattgagatgtattatcacttctctgacgcagaggactggcaactccagtacatactgtgggggctccctaatcccagattcaatgtcayagtatcagttgaggaccttggagatcaaatcccttctataacctccccgacaagtggcagtctagactttgaactccagctaggagcccaggacagctgcttactcctgttaccatttccttgtcatgtcctcaggaactgggaccaatcacatacttctcactagtgataccttgggagccatctggggagaggctttaaaacctattaaaccagcagctcttcaaatgtggtcctcagacccctagggttccctaagaccttttcaggggtccataggtcaaaattattttcataaaaataccaagacattattttccttagctggggatggtggtgcacacctgtaattcccagctacttgggaggctgaggcaccagaattgcttgaacctgtgatgcggaggttgcagtgagccaagatcacgccactgcactccagcctgggcaacagagcaagactcaaaaaaaatgtccttgatgaagtaaaaaaaaaaaatttttttttttttttgagacggagtctcggtctgtagcccaggctggagtgtagtggcgtgatctcggctcactgcaacctccacctcctgtgtcccggttcaagcaattctcctgcctcagcctcccgagaagctgggattacaggcacatgccatcatgcccagctaatttttgtatttttagtagagacagggtttcaccatgttggccagactggtcttgaactcctgacctcatgatctgcctgcctcaggctcccaaagtgctgggattacaggcgtgagccaccacgcccagcctaaatgtattaatttaattaaaccttaatccttaaggaaaaggcttttcaacattctgtctgataaagtgggaagtatgcataagacattttgcataccaaagtatgatggttttctggaggaaataacttaggccattctttgagttgtgagctgaactagctgctcttttatggaatgccacgtttactcaaaagaatggccgacaaactgtggttatcagatttaggtagctggcagaacttttctaaaaaggaacaaagtgagtctgtcacttcagggaaaaatctgacagtgtttgttgccaatgatataattcaagctttcaagtgaaaaatcgaattttggaacacttgtatttgctacatgagcttcacagcttcccaaaatttaaaacttaaagactttactgttctccagtataatactatgaagaaaaacaaagactttactgttgaaacctattgtgatttttttaaaatttatttatttatttatttatttatttttgagacagagtctcgctctgttccccaggctggaatgcagtggtgcaatctcagctcactgcaacttccacctcccaggttcaagcaattctcctgcctcagcctcctgagtagctgggactacaggcgcccgccaccacacccagctaactttttgtatttttagtagagacagggttttgccatgttgcccaggctggtctcgaactcctgagctcaggcaatccacccacctcggcctcccaaagtgctgggattacaggtatgagccaccgcacctggcctgaaacctattgtgatttttaaaataatgtataatgaaacattaatatttggaagatttgcatagctcagtgaatcaattattttccatatgacgaatgcacggtgttacaaaattatgcatgggtaaaagatccaatcaggtgcagttcagaaaaacggattttttttttttttttgagacagagtcttgctctgtcacccaagctggagtgcagtggtgcaatctcggctaactgcaaccttcgcctcgcaggttcaagtgattcccctgcctcagcctcccgagtggctgggattacaggcgtgtgccaccaccacacctgactaatttttgtagttttagtagagacgggagggtttcaccatgttggccaggctggtctcgaactcctgacctcaggtgatccacccaccttggcgtcacaaagtgctgggattacaggcgtgagccaccacacttggccaaaacaacggattttagtttaacagtacaaaaaggtcactgatatggtttcacattctacattgcaactgccccttaagaaactgccaattatcggccaggcacagtggctcaggcctgtaattccagcactttgggaggctgaggcaggagggtagcttgagcctaggagtttgagaccaacctaggcaacatagtggcacaccatctctatttaaaaaaaaaaaaaaaagggccgggtatgatggtgcacatgtgtagtcccagctactggaggagactgaggcggagagagcacttgagcccagaaggtcaaggctgcagtgagccaagccgtgattgtgtctctgcactacagcctgggtgacagagccagaccttgtctcaaaaaaacataaatatgccaggcccggcatggtggctcacgcctgtaatcccagcactttgggaggccaaggcaggcagattatctgagttcaggagttcaagaccagcctagctaacacagtgaaaccccgtctctactaaaaatataaaaagttatctgggcatggtggcgggcgcctatagttccagctacttgggaggctgaggcaggagaatggcgtgaacctgggaggcggaggttgcagtgagccgagattgtgccactgcactccagcctgggcaacagagcgagactccgtctcaaaaaaacaaaacaaacaaacaaaaaatacaacagttagctgggtgtgatggcttatgcctgtagtcccagctactcgggaggctgaggcaggagaatcacttgaacctgggaggcggaggttgcagttagctgagatcgccccactgcactccagcctgggtgacagcgcgagactctgtctcaaaaaaataaacaaataataataacaataaataggccaggcgtggtggttcacgcctgtaagcccagcactttgggaggccaaggcaggcggatcacttgaggtcaggagttcgagaccagcctggccaacatggtgaaaccctgtctctactgaaaatacaaaaattagtcaggcatggtggtgcatgcctgtagtcccagctactcaggaggctgagacaggagaattgcttgaacctgggaagcggaggttgcagtgagccaagatcgcaccaccgcactccagcctgggcaacagagcaagactgtttcaaaataaataaataaaataataaataaatctttccaactgcatatctgttgtgagacaggattttcttcatatgtctcagtaaccaacatatagcaacagatcaaatatggaaggagatattgataatacagctgtccccttggaagccagagagtaaagagattcgtaaaaatgtaaaataatttccatactctcattaattcggggaatgggaatatagttatctttcatttagaacattatgttaacatgattaatgtgtaatgagtttatttttgttatttttaacgaattgatacatatttaaaatttttctcaagtttcattttaatatggcaactattggtagatataacccacttcaacaaaaaagctgtttgggggtcttcaatactttttaagagtgtaatgggttctaagaccaaaagacccacaccgtattagtatatttgataagtacccagaaactggtacataaaaaactcatctggcaaatgttcatgaagtgccaactctatgcctggtgctgtgataggccttggggattcagaattgagaacagtcgtttctgttgaggactcacagaccggcggaggcgccaaaccggtataagaacagttataccatgggactaggatgagggtgagagcccgcaccaagaacacgcacctattaggtgaggcggtgggaagagaagtggccagggaaggcttcccagaaaagctgacacttactgagtcttaaaggccaccaggaatcagccaaggggatgggcattttagggagagagaacagaatgcataaactgtggaagctttaagaaaagtatggctatttccagctcctgcacgtagctcattatgaatgcagcatgaggtacaagtatgaatactgggggtgaggttgggcatggaaggagatgaggccagagaggcaggcaacagccaaaacaacgggccttctataccatattaagaaatgtggattttttttttctcctcaaaacaggcagggtgcccgcacgcctgtaatcccagctactcaggaggctgagtcgggaggatcacttaagcccataagttcaagaccagcctgggcaatctagcaagctcccgtctcaaaaaaggtggggggacagggattagggaggggttttggagaattttagataatattcgcattaacttttaaaaagatatttgacaacaatgtcatgggacagtcaaatgaatgaatgagttgaggaactagaagtaagactacaaaacagactgaagaaaacataaggcgcggccagaggccagcccagaccgacccgaggaggaacctccttggtagaaggcagcctctccaggattaggtggttgtgagacgcgaagggcaggggatacccagtggtctagcataggctactggtggatgaggcgtcttccacggagttagaggaacactgcgaggtcaggccagggttgctctccgtgtggctagcaggcagctaaacagatctgaatgcatttccacgccacctccccaccgccccggccagcggcctcgggttcccacggtccccagcccactgcaaaatccaggcctcccgcccctctatgactggagggtgggggcgaggctagcagctccctcccggcttcctccgcttgttctctcctccccttccccctcctcccggcggctctccacttcctttccccccaccccaccccagggaaaaacgaaaacaaacaccctcgcgcctcgcgcctccgactcccagaccccacgacccggctccggcgctggtttggcggcctgggtgggagaaggcacctcgccccggaccccctatgccccgcagctcagtgactcttcccctcgccctccg

SEQ ID NO: 6785 - DNA, 309996 bp, Homo sapiens
  misc_feature (1)...(309996): n = A,T,C or G, or insertion/deletion polymorphism (see Tables 1-2)
aatgcaggaattttctatagaggtttcttgttatttcactcttctgtactcttggacaagtcattcaagcattctgagccttattcctaaaataggtatgataataatactacccccacctttttagttttagttaggaaaagatttagatgtgagtgacagaaaacccaagacaatggtggcttaaacaagatagaattttttttccctcccctaagtcccggaaacaggcagtcaggtttctatcttgttttttttttcctatacatgacattcattctcatgttcacctcacaatctaagatggctgctccagctctggctatcatgcctttcttccaatcagcagcagaagaaagaggggcaggaaaagggcagactctattccttcaagctctctttccagaaattgcaaaccactttgcttatatctctttggctgtaacttagtcccatggccacatctagctgtaagggaggctaataaaggaatatccatatgcttaggtcaaattcagaggttctactactgaggaaatgagaacagattttggggggaaattaggagtctctgccaccctactgataatgttgtaaagattaaatgagatagtatgtattctgtgcttagaacatgcctgatagataatacatgctcagtattaggtcattgtttttataattacccttggtagacagtcatccatttttactctgtcattctaaattctctctgtttatttgttcagcatatattgagcatccctgatgctgaataatgtgcctctgtttaaatctatcagtaactgaaagaaggccatcatccaagatagcccaccctttgttgaaaagctctaaaagttagggaaatctttatcagacggatccaaagcttacctctcttataattcatgtcttagtcctgatcctcccttttgaaagaatatgagatgagcccatttcctcatctcaattcttcaaataaataaagatggctatcaagcctcccacatagttttcttgctctaaccatgcatttcattaattcattatttatctagtacatggactggcagacttttctgtaaagagccagatggcaaatattttcggctttgtagaccatatggtatttgttaccacttttcagctctactattataatgcaaaagcagctacagacatgacataaataaatagatgtggctgtgttccaataaaatttcatttacaaaaacagatggcttaccagatttgggactcagtatgtagttttccagcccttgatttagcccatgaaaacacccatcaacaggattattcctggcccatagtcccctctcctgaagctgaaaacttaccctgtcactcctgattctgcttatacctttcatttatttttcttgtcttaatgctttggctagaatttccagcaattcttgcatctccatagatctacttcctggccagtcatttctttagtcatattacctatccccaaatatctcaagattggacatactatcttgacaggtaccctcttgttctgccatatttttagcccacacaacctttgacctctcccaggctggcacttatccaatctcccccataaacctgttcacactaagaaaagaagaatccctttttccatctttttcttcttcaaacccactagactatgttcttcattcagtgctttaggttatctttagccaacagttgaatgccactataactctaaatctaacctaacctagccagcttcccttaaaaacaacctagagctgaccaagagtgagtaaatagaaagttaacagttattgatgggtcagctgctgctgacatacaaaatgtatatatatatttcatctcaatattatagatgtggaaagtatatctcaaaattgataatttaatcagctcaggatcatgcagcttagatttaaggagttgatcccagatatagaactgaaattaaaattggagtggacctagtgaagggtgtgtatctggtacagtaaattcaatgccatttcactgatacaacagagctgccagaccttggttgttctttcttaccaagatatttcaaggcatagaataataaacatttgccttgaatttttggatttcaaagtatttccttcacaacctgatggagtaggtgattttatttctattttacagaagaagaaatcaaaccccaaagtggttaaaatttttacctgagataccagaccccaatgtctgactgttttctttttatgactgcccatatttgctcttccctgaaaactccaccccacctgtttatctaactacttcctacttatcttttgaaactcaactgagttgtcttcttgtgaaggaaaccctccctggaaatcactcccaccccatcagcactgtctgctttagatgttcttcctctgtgttaatgcagattatagctctatttacactgtactttggtgacttatcagatggtaaggaaatccaggacaagatccctgccttatttaattgtgtactcaacaaatatttgctgaataaaggaatggtctgagattgaaccaagtctagtgctctataaagtctgctccctgtaatgttgctcatccatgattcatgatagtaagctggaggcaaagcaaagaccattgcttcgatgtctgtgtatatcctcagccttccagagacaaagccacatataagataagcttcttggctgggcttggtggctcatgcctgtaattccagcacttcgggaagccaaggtgggcggatcacaaggtcaggagatcgagaccatcctggctaacatggtgaaaccccgtctccactaaaaatacaaaaaattaactgggcgtggtggcacatgcctgtagtcccagctactcaggaggctgaggcaggagaatcgcttgaatccatgaagtggaggttgtagtgagccaagatcatgccactgcactccagcctggcgacagagtgagactccatctcaaaataaataaataaataaataaataaataagataaaaaataaaaaatgaaaggcttctcctagcagccatgggtcttcatagctagaagacatcagaaacccaaacccatagggcttcagactagatggaagataaaacagcatagtctatggctaagagaagagattctgtagtcagtcttcttggatttgaatcctgtctcaatcattttccagtggagggatctttggcaattcacttagcttttctttgctttggtttctactctttcaaatgtggatagcagaaattatttgtattagttatctatcactgtgtagcatattagcccaaaatgtagtggctcaaagcaataaacatttatcatctcacagtttctgtggtcaggaatttgggacgaggcttatctgtctgagggtctgtcatgtggttgcagtcaagatataggttgcagatacaatcatctaaagccttgactatagctggaggatccgcttccaagatggcrcactcacatgggtgttgtcaagagtcctccatactttccacagggatctcttcttacaatatggcagcagattacccccagagcatgcgagagaggagtagcaaggaggaagctccaatgactttcatgactgattctcagcagtcatgtactgttccttctaccacattccatacattagagggaagccactaagtataacccacattcaaggggcggggaattaggctccaccttgtgaagagaggagtatcaaagaatttgtggacatattttaaaaccatcacactatcttgtagtattgagtgagaattacacaagataataattgcaaagtggccgggcacagtggctcacacctgtaattccagcaatttgggaggctaagatgggaggatcgcttgagcccagaaattcaagaccagactgggcaacatggtgaatccctgtctttacaaaaaatacaaaaattagccaagcgcagtgctatagtctcagctacttgggaggctgaggtgggaggatcacttgaacccaggctggttttaaaatatgtccacaaattctttgatatttctcctttcaaaaggtggaccctaattcccctccccttgaatgtgggttatacttagtaattccttctaacatatagaatatgatagaaggaacagtatgtgactgctgaatccaggaggcagaggttgcagcaagcagtgattgtgccattgcacttcagcctggtaacagaatgggactctgtctcaaaattatgatgatgatgatgatatttataattataataacaacaataattacaaagtccttagaacaggacctaagcatcaccaaaaatgttttccccttctcctcctttgaattgcttacctcatgggtaagaaaggacatattagctgtcaatctgaaggctttggcctgaaaaatctctttaaaaaatagagcagatatttgaattcaagttagtgccatatgccactaaaattatctatataatcttgacctgaaaagttgttcatggtgtgctttgaatttttaaaagcaggtacagaacagaatgaccaacattatctggtatttgcatagttatacacatatatctctatgtatgttgatgcatagggagtgttctggaaggaggtttctgaaagtattgataatagttattgctgtgtgataggatttgttaggatgttgagctaggacactgctgctctgtgtgggctggtttattccctgcaaagaatatgatttctagggtttccagtgatttttcagagtagttgtagagacatgaatatactgggagcctctcacccttgaggctgtgtttgtgcttgagggaacacatatagaagggattaaggggtagttgatgactctttgggaaaagagggtacgggagaagcaaggggaagaaagacatctatttgtcaaagagcaaaggcaaggcaaagctggtgttggcagcagagcgtgactgctgattagttttctcgggagcaactgcttctcctggaagggaatgatatgctcatcatgggcaccttctagtcctatagtgccttgtatatcctttataattgtgtttccacattggatagaaatttttttgattccctctctctactaacagagttacaagcagtgcaggcttgttagtgataagttatttcagctttatatgcctggaaaagtttttacttaatttttatttgcagaagacatttttgctgggtatagaatttgaagttgacagtagtttttctttcagtactttaaagatttgtccactctcttctggattgcattgtttctgattaaaagtctgctgtcattcttatctttgtgcctctttgcttaatgtgccttatttctctagcttccttggcctccctgaagtcttaactatttctcttctactcaggtaaattgttggattttatctgagtttcccttccttgccttgttgcctggaaactttctaagcagtaagctagggcatttatagggctcacttcttttttttttcttctttcagacatcaatgtctgtgttgctcgttgttcaatatctgaaaaccactgggtttttttctgattttctttttagttatttaaggtggatgaataaatcttgcccttgttactccattttggctggaagcagaagttctgaaacattaaataaaaaaaaaatactaaaaacataaaaaccaacttctgattgcaaaaaaaaaccttttttctcaaaattgtctgtatcttaggattgtgagatcatttttttaaaaactcactgagtgccacagtgtttgacattatctcttttcttacaggaaacaggaatcattcaaactggattttaaaatcattgcaaatcagtgatggatcagaagttgcagagtgcaatcccgagtaaaagtcttcaaaaaattttgcttcaggtaacagaggaaggaaaattgatctaccaccttaaaaccctgatctagaaaaaatatatattcatgataggaagttataactaagaaaatttatttgcctcttaatgctcctgaatgaaagraattatccctttgttctttgggaggacttgtgtatctgagattgttgtaataatcagtcattttattaaaaccttgacatgatcaccagggaggaaaaatagagcaatagtcaaaacctgtgtgttagtccaagatgacttctgaagaaatgacagcttctgttctcatacctgtgactcagagaaaagtggtttctgcccagtcggctgcagatgaaagtagtgaaaaggtctcagacatcaatatttcaaaagcacatactgtcagacgaagtggggagacttctcataccatctcacaactgaacaaacttaaagaagaaccttctggaagcaacttgccaaagattctctcaatagcgagggagaaaatagtgagtgatgagaacagtaatgaaaaatgttgggagaaaatcatgccagattctgcgaaaaaccttaacattaactgcaacaacatattgagaaaccatcagcatggccttcctcagagacaattttatgaaatgtacaactctgttgctgaggaagacttgtgtttagaaactggaattccttctccactggaaagaaaggtgttccctggaattcaactggaactagacagaccttccatgggcattagtcctttaggaaatcagtcagtgatcatagagacaggcagagcacaccctgacagcagaagggcagtatttcattttcattatgaagttgacagaagaatgtcagacactttctgtaccctatcagaaaacttaattttagacgattgtggaaattgtgtaccactacctgggggtgaggagaagcaaaagaaaaactatgtggcatatacctgtaaactgatggaattggccaaaaattgtgataataagaatgagcagctgcagtgtgatcattgtgacaccttgaatgataaatacttttgctttgaaggctcttgygagaaggttgacatggtatattcaggtgatagcttttgtaggaaagactttactgacagtcaagctgccaagacctttttgagccattttgaggacttccctgataattgtgatgatgtagaagaagacgcttttaaaagcaaaaaggarcgatccactttgttagtcaggagattctgtaaaaatgacagagaagttaagaaatctgtgtatactggaacaagagcaattgtgagaactctgccttctggccacattgggctgactgcatggagttacatagatcagaagagaaatggtcccttactgccttgtgggagagtaatggaacccccgtcaacagtggagataaggcaagatgggagccaacgtctgtcagaagcccagtggtatcctgtaagcatttgagtttctttttaccatttctttaaacttgctttttttttcaaaaaaaagtccaaatttccattgtcataattgatgagaaattttaagatctgtcaaattatgattcttaggttaagcatttgtggttattgaaaacagatactccaattgatagctatcaagattgagttgatactgcaacaacataaaagtgtgtcaraaaataatgttattgggagtggaggaattagggagatttcctggtagtggaaaaatggctccatttgttgcttatctgtttgtgttcttttgagataaatgcctgggtcctgttctatggtgtagttcattattgtttttaggtctccagacctaacagaacttaattctgttttttttcattttccaactaatggccccacttccttccctcttaaacttttttatgccctggattcctttggcaaagtgatgaaacctatggattcagaatgatgtttttaaatgaatcagatgaaatagaaatcatcataaaggacaagttatgcggatatacatttatcatgatttttttaaattaacctgacaatttaggtgcttctttattaatacatttaataataatatctagttatgtgataactatcataatttcaaaatagaattagccctcatctgtatccacagattcaaccaactgcatatagaaaatatttttgtaagaaacaaaaaataacaatataacaataaaaaataacacagattttacaatctaatacactgtaacactatttacatagtataaggtattctaagtaatctagagaagatttaaagtatacgggaagatgcatgtatgttatatgcaaatactaggccatcttacataagggacttgagcattcttgaactttggtgttcgagggggtagggggcagttctggaaccagttcctctgagctattgagggataattgtagtgatgaatataagtccttatattcataagtatagattgtatacttatgcatatattggattatgtatatatacttatgtatatatagtatggatttcttgaaattttctcaattttagcactgtaaattccatgtcctggaaaacccttcagaccaaaccagagcagtcgatcaccctaaatatcaataacattttaggatatctatcacaactgtaataggatatggaaatatctgtgacttctattggtgacaagatcacagttactattactactactgaagtttgttgcttatattcagaattaaaggaaatgctaaatttcctttttgagattaatgaaaataatgaatcacttttttttcctcaaccagatttccaggtcctctgaattctatccacagtctcccctctttaagaatcctgctctggaaatacacatgatcaggctgcctgctctcagaccttatctgtacatctgaggacagtgccatgtgccatcttggatttttttatcctgaaaactcttgcttccttcagtcattctctatgtgaaactgtttctagaactctcacattccaatttttcataagtcctttaaaacctgaccctagaaataagcacctggtctagagaaacatcatttttattgaaatataagtgctatatttttactttcatcatcatcatcatcatcatcattgtattagtctgttctcatgctgctaataaagacatagtcaagactgggtagtttacagagaaaaagaggttcagtggactcacagttccacatggttgggcaggccaaacaatcatggcagaaggcagaagaggagcaaagacatgtcttatatggtggcaggcaagaaatcatgtgcaggggaacacccatgtataaaaccatcatatcttatgagacttattcactaccatgagaaaactataggggaaaccgcccccatgattcaattatctccacctggccctgcccttgacacatggagattattacaatttgaggtgagatttgggtagggacacagcccaaccatttgagtcatcaatcagggtagctaacatttattgagcattcaacaaatgccagatattgggctaaataatttacatattccatgttgtacaatcatcttaactaccttaggattttgatatgataattaacacttytattgctaagcaaactgatttcctgagaaattatgtacctcatcaaggttacttagctagtaagtgaaataactaagatttaatccaggcagctgacactcctaggtggtttcttaagatccagaaaggaataaaattcagaggaagcttttaaaagaacggaagaattctgttcgtttcagcatctgttgattgagtgaccccattcattgatgctcacggtatctcagacttggccatgttaggtatggtgattgtaaacctgcttacacgtcacagtcactgtccagacccctcctcaggccctttgaatcagaatcactggggtagggcacagcatgaatatttttttcaaagttcccttggtgattctatagattctatggagttgggaaccattggctaggagtttaaacagagctctttgctttttgatcaggacatttcaggaatatttgcctttccctaaaaaagacactgcttgggttcttaggaacatttgggctgacctgggaacctgcctgaaaagtgaaagcctgcaggtccttctctatacagttgaccactcaccccagccagtgtctaaggatgtgtttctgtgtctcttgacctgattccacatgaaacctgagtcacagacaaggagcccctcaccagcatgcctgtcctgctcagcactagatgacttgcacagcatctccctgccatgaaactgctgctgagagcaacgtgtcatcttagttaaaaatgcagtggtttaaaaaatcatgtacactcgaacattaagagcacaatcgaaatttaaatatagcaaagtgaatggaaataggttgctttagaacctttatcattgtttccctatgagggttgtgaatcgggtgtaaatttcagaataatttttggtatgcctataccctcctccagtttcttcttttctatagccctgctgctgtttcttctgagcttgttcactggtccccagctcaaacctgcccttgttcatcaaaggcctgggatggttaatttctaattgaaaaggacaaaagggatgatgcaaattgtctcttccctgcttcttagtctctggaggctgggagaggttgccacacctgtcagagtagactccaggaacttttatccccttggtctgagcaggcttggaggaggctattggcatttttattaaccattaagatgcggctggggaataggctggttgtcctgtcctttcttaagggagatttctaaagggggggccctttctgaatattcaaaccacaccatatcagcaatgaatcagtattttctaaggtatggtgttctgtatatcttgttttttagtttagaatctggtagaaattctcaaaagttgcacaggtgaattataactagtttttcccagctcctatgaattacttccttcaaagatgcggatcttaatgatatgctccttttcctgtgttttggtwattacatatgtgtccgttctggttcctcaatcagattgtaaatcgattaaggacaagaaataagttctgcattattttactctccataatgcaagcataatgccaagtatacagagaataagggcaatgtaatggttacaaatacagtctctggagtcagtcgacctgaatttaaattgtgaccctcactccatcactgactggccatgtgaattctggtacacagtttgacctctttgtttctaattaccttttttataaactgagaataatggtgttattgtggcgttaaatgagatgctacccaccacacagttctagcaaggagtgagtgctgctctgctcactctggccactgtggatatgctttgtcgagaacacatttccaccaccttctgctgtgtgtcttctcactcagggatgtttacagtggtatgaatttgaattcatgtttctcaatctataatgaggtagtttgaacaatccttcccacacatttaaagaatgtgctgtttgtacaattaattccttggccctcacattaaacatttttttttcttggataccttggtcagaatgacccatttaatttatatttgcacagctgtgtagagaagattggctttgaatggaaaacattaatgaagattaatgcttgctgacatactaactactggtatcctccttctcctcctcataagaaattaaaaccctatcccttatccagttacagtcatactccctctctcctgctctgaaataagacaggatattttgatgggtggctaaagtctccaagctaaagattggttaggggtgtttttcctttaaaaaaaaattctcaacctgcctgaattttgaggagtttagatacatatagttatcttgaatgtgaagtacaagaagtttctgcttctgccttgctggaattgctcatgtaacctgagatccacgtgcactcagagaatgtgaaggtgccagggcagaaattccactggctcctgtattatcactttacttatttcccttctttgttccacaagatttactgtacaagaatatgtatgacaaaatagaaaaaaaactcagatacactaaagagtaaaaaacaaagaataaaaatgtaaagattgaataaaaaaattttacatcagtctagaaaagctataatttaaaaaggaaggtcaaaagcagcttctgtattgctgcttcttattctgctttcttccttttaaaagttgcctttcttcttcatactttactctcaagaacagaaaattaaacctaacaggcaatttttttttagtgtttcacaaaaatgcctttgttggtatacatgtccttgattctatattttgtctctttcaaattgaagagacctgaaccttaggggagagataatgtctgttgtgtgcaaagggaccaaccgctaataaattcatcttctgagtygtaatttttatggatgataaaatatccattgagccccactgttcaatgttgtaagggattgctgttgagatagcaacatgtcttgttttctggtctggaaatttggttgccctggagctagggtacagtttggaccttgagacaattaaaatttcgtggggtgcttaggcttagctggaagcctgtgcttggtgatttgccaggctgcctctttcattacgaagggtagtgatgggttgatgacatgggtataggatgatgctggccccttcctgctgggcacagtgaaagggaatccagcttcctctcagctcctgtgcagtttagtcatgtctagtgcctcagtggaaaatgtgatggctgtcagagtccagctttgtgatgattggactgctttcccttattagctgcattggtgcactataggataaatgtccccccgcatctctgtagttataccagccctttggctaagatttggtaagagcgggaatgaaaaaccttgactctggattccagtgtaaggtaaatgcactggtggccactgttattctcatagtattctttggacagtatcagcattaggattattattatttttcttttccctagatgtcctacataatgggaattagcagctggagaggccccatccctgaaaatgggccgtggtagtatgtggcctgaaaagaattagatccagtgggcaaggataaaaccatctggtgaaaccctgatctgctccacaacctgtattttgcagaccagagactcaagctgccctttgaatgacctctgaaaagtcacgagtcatagaagtggccccttctgagcttaagggagtcctggggttagagaggaggtttccaccctgttgatcaaatgattcagcattcaaggatttgaagcatcagtggggggaggtgcacccactgacccccacgactagactaactggtggctcagacagcgccctctctcaaaagctgttcttagacagcrgtgctrggcttattttctggcaccatgacaaccaaatggtgcccctttcagtggttctttattctagtggcttgcttaaacacattcagagcttcacattaaatataggtcttctagagctcaggcaccagaaccctgaacccctaaccccaaggctcagtcccttacaaggaaccccaaacccttccttcttatttagsccatcactcctcaaaccctgagaaagctcagcagaaaacctcctcagccttcagcaatacaaagtcatgctatcattkttcaaggatagggaaagccagtcctttgaaacacaatagcagatttccttgaaggggaggagaaatgctttggtgtcttcttattttttttaacagctttattgatgtataattcacataccatacaattcacccagttaaggtatacaattcagtggttttaaatatgttcacagatatgtgcaggcatcactacagtcaattttagaacattttcatcatctcaaaaagcaaccctgtttcttttagctatcaccctctatcgccccatcctgtgcctctcccccagccctaaggaaccactaatccactttctgtctctatagatttccctattctggactttcatatgaatggactttcatactgtttggtcttgtgactggcttctttcacttcgcataatcttttcaaggttaaatattcatttatacggtagcatgaatcaatattcatacttttcactgctgaataatatttcattgtatgattatgccccattttatttatctgttcatcaattgttggacattgagttgtttccacttttggattattatgaataatactgctgtgagcattcatgcagaagtttttgtgtggacatagtttccatttcttttggataaatacccaggattggaattgctgggtcacatgataactctgtttaatcttttcaggaatggccagactgttttccaaagcagctgcacattttacattcccaccagcaatgcaaaagggttctagtttctccatatcttttttttttttttcccggagacggagtcttgctctgttgcccaggctggagtgcagtggcacratctagactcactgcaacctctgcctcctgggttcaagcaattctcatgcctcaacctgaggcatgagtatttgggattacaggtrcgtgccactatgcccrgctaatttttatatttttagtagagacagggtgtcaccatgttggccaggctggtctcaaactcctgacctcaggtgatccgcccaccttggcctccgaaaatggtgggattacaggcgtgagccaccacacccagcctgatttctccacatcttgaacagtgtttcttattgtctgtcttttggttatagccatcctagtgggtgtaaactgatatttcattgttttgatttgcatcttcctgatggcaaatgatgctgaacatcttttcatgtgctcttagccatttgtatatcatagaaatgtctagtcaaattatttgcccatttttaaattgagctgtcttttttatttttgatatatattctggatataagttcattatcagatatgtggtttgcaaaatagatttagatatatgtataggtatagatatatgaatgaagatcaggcaagtggcaaaggaggtttacaattttatttacagtggagcttgttaaacatgtcccttggacattcatctccttctcaatatttctcacattattctaccagcaacaactttcaaatatgattaaaaattttttttgtagcagcaagatcttgctatgttgcccaggctagtctccaacttctggcctcaactgatcctcctgcctcagcctccgaaagtactgggattacaggcatgcgccactgtgcctggctccaaatgtgattttaaaaattttccaacttctccagattctcccaaactccagtctgcatagcttttcttttttttccctcctccctttctgcctaaatgttgttatctaaattgttttttttattatccaaactctgcaccccagagcagtggctgggaatgagattgtcagtccacaaccttgggcacaaggacatcatccaacacagtgatggttgaggaagaggtcgccacatcacaataatgcactccgttatgcacaggtacaagcagggccatcactagggtgagacaagtgagtgtctcacccttgtgcaccttctctcagggtctcagaagtgccacccatatacttcttagtgagtgcctccttaaattgtgagtgctgggcagctcccttgtcccactctagtcctagccttggtacaagggcctaagagagtctgtggtttagaaatgaataccatcttcctagttcaggaatgaccttgactgaaccctcaggtacatcaatacagatatttgtaaaataaaagctaagagtggcttctgcatttttaaatggttgaaaaaaatcaaaagaaggatactatttcatgacatgaaaattatatagaattgaaattgtattgctcattaataagggttagggagcacagccatactcattcttytatgtattgtctgttggtgcttttaccctctaatggcagagttaaatagccacaacagacactgtatgacctgcagaaactaaaatatttgttatcttgtcctttacatgaaacctttgcctatccttggcttagaacatccctcgctacctggctaactcccattcagctttcaggcctgagcttagtttcactttctcttggtggtcttctctgccagcccccaactcccaccctggaccctaggccagagtttctgacagtcagtgctcaatatgtatttctcgaatgactctttgaattataaatgaagaagggcggtttccacccacttctgctgtctccttctttccttccccagaactactgcaggcttgttagctgtcctccgcctgaccctcagagcttggaaccagttcttttgtgcaatacctgtaggacggaatcaggattttccattgaaatttgaaaggatctttttcagtcctgcaaacccagcaatccatgcttgtcatctccccagacttggcctgaaaggtcatgtttgcatctccttgtccctggctccccatttcaactggctgttagaacccttgagaaagtttctggatcctttttgcttacaagggaacacctgagacagctgtgtgcttcagtgggccaagaaggaaacacgcctcccgatctcaagaccccagagctctgtctctgctcttcagaacccccagtgcttcctagacagaattttccacatggactggagggaatctagcttctgtcagtgggggttcggggatggacatggtggtggagggatagggacagcatgctgtcgttgtaagttggggagatcatttcattcctggggtttggaaggtgtttgtctagttccttcaaaccatttgacaccaatacttttggtaagagacctgaaacagcacccctctcttctaaaaagagccaagtactaattccagctctgccattggctgcttgtgtgacttgagcaagtcactttagggccgagaattttaggtatttttcagtattaaaaaaagagggagggcagacatgtattcattgcctgctgtatgtcaggcactgtgtctataatttgcatatagtaatttaacaaaktataaattaacacttcctcttaagtctaaaattgtgccagtctgtggcttcctgatttaaatcctgaccctgagtttcaggttgagtattctacctcccycagcaatgcctccttgaggtttgatttggaatgaatcttgtgactcactccctgacgctgtgtagtagaagggcagaggatttggctaagcctggaaatgtctgtagaagtaagatggtaagtactggctggatgctttctgtgtcttacactgggcttcccagatgtcttgtcttttatcttttctttcctttcattctcatggcgactgtctatgaggttaaacacccccatttcattgggtcctgtgtgaccaatgtcacaccatgttagcacttgaacccaggtctggctacctctaaagtccatactcataactgctcctaagttcctctggaagattctgatgcaacttacccctataacttggcagaaattctgttctcttattaaatgtgcaaatgttgagctggatgagtccctgagctcttttttttcttcaaatgtgaactgggtgtgacttttggatgaaatgggagatgcagggaacaataccaattcttaatgcgaggggtgtgttgtctattgaaatggctaagatttattttttatgactcagcctgctaggaggaggaaaccaagccccaaggtttgaatgttttacagaattgctataatttagaagtacagttaagaagttttataagtaagtaagcaagagcaaagtccaaagcaaactgcacacatcttgagtcagaatctatagcttattcacaatcatgctgagatacccaaaaatactggcaacgtatgttagtatttttccattttaatttagttttctgtgatctctcagggttctgaccaaccgacctaagtatgaaagacatgactcagtagcatttctttccataatcacaccattagaatgaagttttcacctacttcacaaggttgtgaggcggtaggaaaaagatctaagcgtgttgtatattaaagtgcttggcaaacactatttaaacctccctgcaagtataacttttctcctcttactccatgctctaaaggattcagagtgaggcacctggaggaaaaacagacacaaaactacagaggaggcaacaaaacaaaaccagaggcascctgttttcctttcataaatgctgcaagcgcagtcgaacccgctatggaaacccgacgctttggtttgcctttcagggtgctggcatgaatgaataataacttcattttcaacttgagattagataacttttatcaccaacacctacttcattttatccctatgttttaatagaataaggaatagagaatcaatttgttggtagaccatgctgagtagcttagcttcagaaagatttagcaccaaattataaatggtgacactttaatagtgagtgtgatgtgcattgggagccagcctgtgggagtttggcagttggaaagccccatagcttcattttttccagatttttgtacccttccatcagatagtaactccttagccttgagaaactctcttccaggacaaggggaaagtttatttgagttctaaattgtttaatagcaaatgcattatttgtctctttaatgagaccaagaaaatggcttcagaccctggttgaaccagccagttctccttttgatggccacaaaccaaatatgggcagtgtaatgatggtatgactctggcctgactaatatttttgtgargagaatgccattattatggtgaccatattttccaaacaaaaaattgggaactttttattcagaggaaagaggggcagaatatttgaaattgagactgacccaggaaatccagaatgaatggtcttggtagctattgatcacagcataaaggaaaaagaatgtgaatgaaccagtgcaaatctaattggttgctagaaaagtcaggagcctcaaaatgaatgacttgctagtggtggcaaagaatcaccatctacatgyaaagaaaacacattagatgccctgagaatccagtgactgtttttctcagagtttttatttttctgtatttttgccgagtacatttagtagctaccatgttttggaaatgtgaaagtaatgaaatagatttaaactccaggtcttgctcagctaaataatgtccctttccaaggaatcaccttgaaaggttgtccccactttccatttatgctgccattatgcacaatgtctcaacccttggattgagatttttagaaacaatccattcaagcatcctggctaatggtggtttgggtccatattgacatgtgattataaaggacaggattggttttattagagatcttaaaaactgaatggaggtgaaaggagatgtctggaaatattttaagcaaaggtaaaactatatgttttgtatacaaaacacaaacttgaacacagacttggccgttgcttcacagtcctggccatggctctcttcagtgttgatggacagttcagaggcactcacaaactcagaatgcagctttggtttggactgagcctcatgggcacaaagctcatgccaaagggcagattggaatttagccctgtctcttccaccttcctcggctagatgcccttctacagggcacaacctgcccagccccacatggtcatgctagctagaagcacatggaacagaagcagaagagcttctgaagcccaaaacttcgatttttttttcttggattcatacattatatgctcagaacagtggagtctgttgagttccaatggcctaaaatatgaagacattaaattaattcaggtgaatgcttttctacatgaatataaaataattatttggtaactttacgaactatagattcttgagctagctcatcttttttaaaaattttttattattattttttctttagagacagggtcttgctctgtcacctaggctgaagtatagtggttcaataatagctcactgcagtctggaactcctgggctcaagcagtcctcctgcttcagcctcctgagaagctgggattatagatgcataccaccatgcccggataattaaaaaaattttttttgtagagactgggtcttgttttgttgcccaggttggcgtcaagtaatcctcttgcctcagccccctgagaagctgggaatatgggctcgtgccaccacacctggctaatcaaaaatatatatatatattttttgtagaggtagggtctcacgttgttgcccaggtttgtctcaagctcctggcctcaagtgatctttccgccttgacctctcaaagtgttgggattataggcatgagccatggtgtctggcctggcccatcttctataatcacgttcagtcccttgctttatggataaactggccaaggccctagacaggtgaagttacttgaacaggtttacatagctaatgatggaagatccagaactggaatcaaggtctctatagactctctctcctcatctctaaaatattataaaaaatacatttctgatacaaatagctgtgtcacctagtaggttctctgttgatgttggcagattctgaaccctaatgcctttacagttcctgggatgcatacattcctgaaacagagcaccagccctggaagagttcatggtgggatagtggaggcagacatgtctgtctctcacttatttcatcctcttcccaggctgtaaataaccttggttgggccaggcgcggtggctcacgcctgtactcccagcactttgggaggccgaggcgggtggatcacaaggtcaggagatcgagaccatcctggctaacatggtgaaactccgtgtctaataaaaatacaaaaaattagccaggcgtggtaaaaaaaaaaaagtaataataaccttagttggtgcatagtttctcaggtttgtcctgccttctctgatccattatggttttcttggctgatcctgtcttcatttctttaagaaactggcacatcttgttgcaataacattgtcaattctttaagtgctcagagatgcccttttaatttggatgtagccaggttttgtgagttcatttctccccttagtctagtttctttccmtccttcacttggcaggtagttctctctggttaatgagtgtgagtgcttcaaagcatacagagcagccatggggtccctcccagtctctcaggaggatatttcccgttgttctttttcttttatttgtgagaagcagagccaaatgcaagacactgagcccagcaggaggggccagacctggcccaggaagagccagtatggtstgggctgcaaggaattgagccaggaaccccaggctcataaaacatcagcactgcaagggccttagagaccatcaggtccaacccttcattttcagaataggaaactgaggctcaaagagacaatgacctttcacaggtctggtcaggcatcagtttcagagccaggcctggagcccaggttgctctcagatcaactttcctgccctgtgcctggatgccaaacactatttctgacccattgggtgtggagctgaactgatcaaattataacagctaagtaatggagggcttaaggctccataatgattaaaggtatgaggttaggggcatgcctagtttcaaattctgacctggcacttactatttatagctctgaggcttaatgcaagttacttaccctctctgtgcygctatttatttctaaataattgtacctacctcttagagttgttgtaaagattagtagacttttatacgttgaatgttaacatatgttaacaaacacgttacaaatgtttcagcatttagaacagtagctggcactatgtagctgttgttgtttccttttattcttttttaaaattttgttatttttttataaataacctttttaaaataaaaaaccttttaaaaaataaaaagccaaatttagcagtgggttttgtataccaactttagtgacactgttaataagttctgataacccactaccattggaccaaccttctttgattcttgtcttgatttttaaccacaatgctatattacctccaggtaaataaagatttttctctagggaccctgacagaatagctataaaacktggtatactgtctcttaagtgctatatgagtggcagggtaatttgggtagtcttagaaggcttcatgggagaagtgggatattagttcctgccaggggccagaattgcttgtctccctaccagtgagaaggcaaagtgttccgccataagaaaattgaccaccgttttctttcacaggagtccatgggatttattccaaaaataatattgatttctgaggcccttttgccattttgttttagccagttcttttcctccygccttttatgacttcacataaaatttaaagggatataattgctctcaatagaattgaaattttcctgttgtgttttcaaagcatctattttgaaaattgccttctacactttgcagaaattgttgccagcatctgttgatgtgaggcaaaggggaccaatgtatttatttttatttgtttttttgtttatatagttagtcattttcagtagtgaaataagcaccgatgaacttaacagccaatagtaaaactagaaccttgacaaaccctatgcctagccatatggttccctgctcttgaccaccccaaacctctacatgtccctcccttcccaggtaccatcttccttaattctgtttctgtcattcccttactttccttttatacagtgttattgcatctacatgtattcttaagaactgtatattttaataaatgccactgaattgtacacttcaaaatgrtgattactatgtgaattcatgtcaaaaaaaacttcagattttaaattttagttgttttgaagtttatataaaggtacactgtgtacaatmttttgggacttattttacactgtattttattcctaagattcatttatacttttgtaggttgctgtagttcatttgttttaattgctgtattatattcctgtatgtgaatatatcatactttactggtgcattctccagttgatggacatttagagtgtttctatgtttttggtattttaaacaatccatccatgaatatttttgtatatgttctttgttatatgtgtccaaaattttctcttggatatatccctagaaagcaaactgttgaaacacagggtatgtgaatgttcaaatttaggagatagtagtaaactgttttctaaagtggttgcatcagtttacacaccccccaacccttgccactatgatgtacaaaatattctttggatctacactctctctaatactttatatgtttcaacttgttattttgccaatcaaatggattaaaaaatatttctttgtttaattttgcattttcctgatcactgatgatgtttaccatatttttgtgttttaattggccgtgtagtttttgtgtgtgtaaaatgcccattttctgttgggttgcttgtgcttctttattgatttgtaggatttattaaatatatatatgtgcatatatacatatatatttaatatatttataaataatataaatatatattaaatatatatgtatatatgcacatatatgtatatacacacatatatatagagagagagagagggagagagagggagagagacagagtcttactctgtcacccatgctagagtgcagtggcaggatcttggctcgctacagtatcaaacttctgtgttcaaaagatcctccctacttcagcctcccgagtagctgggactacaggcatgcatgcctggctatttttttttatttttagtagggatgrcatctcactgtgttgcctaggctggtcttgaactcctgagctcaagctatgctcctgcctcagccttccagaatactgggattataggcatgagccagtgtgcctggccagatatattcttaatattatctttttttgtttgtgtatagtgttaatactttctcctatattttaattgtcttttcttttttgtaagattttgaataagcaaaattcttaaattttatagtcaaacttattaaagttttatgaacactgctttttgtttattaaatgttttctctctacctaaagtctaagatattcacttatattttctgctagaagctttaaagttttrtttttgacatcgaattccctaacccatttaaatctttgattttgtatatggtgtgacgtaggcaggaatccattgtcattttctgtgtcaatattcattttccagctctaatctgacatgtcacctctatcatataccaaaattccatacatgtgtgggccttctctgagccctttaatttagttcattggttaattcatccatcactgtgccagtaacattaggaagtcctaacaacattttttaagaagtgtctttactattcctggccctttagttaccctgtctgtctgtctgtctgtctstctctctctctctctcataattattgttgaagtataacacatctacagaaaaatatgcaaatcatataaggtgtacaggtcaatgtatttcacaaagtaaacacagatttagccagcacccaaaccaacaaatggaatattagcaccccagaagcctttgttgtatctcctttcagtgtctctctccctcccacaaaacaaactaatattgtcttctaacaccattcacttggcctatttttgaacattatataaaagaattcatagttggtactattttgtatgtctccttttacccaaccttatatctgtaagattcatccatgtcgctggatgtagttatagtttgtacattctcattgctatttcccatttcatttcatgaatatcccactctttattcattcccctgttaacagtcatttggtttgttcaccgtttggggcttctatgaatagtgctagtctgtttcctgccagcctttaagtccttgcctgagctagttccctcttcttgtcatatctctatttactccacgtattagtccattttcacactgctataaatatactactsgagactgggtaatttgtaaacaaaggaggtttaattgactcacagttccacatggctgcagagggcttaggaaacttacaatcaggcggaaggggaagcagtcaccttcttcacaaggtggcaggggagagagaaagcatgtgaagggggaactgtcaaacacttataaaaccatcagatcttatgagaacttattcactatcatgagaacagcatgggggaaacttcccccatgatgcaatctccagtcacctcccaccaggacactccctcaacacgtggggtctatggggattacagttagagatgagatttgggtggggacacaaagccaaactatattactccactacttaagatcctggccatttaacaaaacctaggtaagtacatcccatcccttttgtgaagagctcttagactaccctaatctaccaagttcttctctgtcagggcatctaaccttgtagcttatgagttgaactataagtgtaatacttggaaggtttttttgcaaaaaaataaaaatttaaaagaaaacaaaaaaataattatctagcacatatgaattaagagaagtttttcctaaacatgtaaacactgagtttacttgtagtcataatatgcaaggaaaggagggaagaaacagcttccaagagtttgttcaattcaaagagatgattggcataaccaacttgcatttcatctttcttcagaagaaagcataggctaggttcacagcatgaagtgatggagaaaatgatcaaggttgttgacttacatggttctgctcctaactctggccagtttatgggatgggatacttgtaagagctgaggcagagtattaatatttagtttgtgaagctgtcagatcactaggcaatggaaacttgaaaagatctcctcaactactttttcagattaaggattttggggtaccaaaaagccatgtgacttagtagtggtttgaagtgcatcattttcttaccaatgggacaagatatctgaatacactgaattagaaaatgttaagataaaagcaaaattcaagccaaacaaataagactttcagagttaccagcctgggtgatagagcgagactccaactcaaaaaaaaaaaaaaaaaaaaaaaaaagactttcagagttacttagaagaaatggaaattgcagaagagatttgcagtttttcatgtgtaagaaccgtgcatgaagattttgccagctgctctggtctagttagatgattaaacatctgcttcatcatygaagctcattgtaaaagaaactgatccatctaaaaaagaagtcatgcccatccaaaggatacgtcattcaaataattttgtagataagtatatgcatcccaaaactagccggaaatttctgattatgtggtcaaacacttggcaatgttggaggccaatgggcattgtaaaattactgctaagattgaaacttaaagtggctgttagtaaaataggcctggattcagaattgaaatgcgctggaactgaatacagtccacagtttctaaacctgctaaacatcagtattctcatcaacgtgattaaaattgaacagtgacaagcacacatctacatacctacttgtgatcatgtgactcactacttggctgccttcatttgtatttgtttaatcttacctaacttggctttaaacttaaaattataaaagtaatacactctccttgtaaagaaaaatcggtgtataaaacttttaaagtgacctcttctccaatttctcccaccaagtgaacaaacagttcattggttctggtttcacactttcctgtgaattctgtctaggttttcagctccttcggggcatgaatttcttatttaattttgtaatcctttttatccagaatagtgctttgcacaaaacaagttctcagtacataacttatttgactaatgattgattgaataaggattggaggggagaatgcccacatggaaacctagaggcttgtaaccaaaccaaaaagcaatgttttcaaagttcaattcagttgcatttgacaagaagtattactaataacctttaaaggagcactctaattgctacttttctaattcctccttccccctaaataccaactcacaaagagataataaacaaatctttgagaaaaggtaagtgtgagtccctcctccctacttctccttcttagagtgagggacatgaggcaggagaggctggggaagacagtagaggtgtcctcgcagtagataaatctgttactctgtattgcctgactgtaaaatttgctgtggaacatttttattggtaatttcttttgcagatgtttctggagaaagttgaaattatgctggtaaaaacatatctagactccacattgcaaatttaaacatattgtattttatttccttaagcaaaaagggaactctttttccccctccttcttttctttctttctttttctttttttcttttttaagctagaaaaaaggaatgaggaaagtccaaagtgtcttttcctatttggactgaaaaattaattatkgctttgggaataaaggtagtgagcatcatatctcatttctagttaacyggtagttccctttacatataaagagcaattacttttgaagactcaaaaaatatatagtcttaaggtgtgcttcatattatttccccatggtttcatttttatttcattatcctctgactccatgacaaaatgtttatttggtgcttgcaaattgaaaaaatctggagtggaataagccacttgccatttctgattaattgccttggatatgcttttaaatcctcccactgaacctgaagcgtactgtcccaaataacgctttttgaagagaaaacttttggaatgcccttcatttctttgagttttcataagagtggaatgtgttatacaggcagcctagtgagcagttaagagctgggctctggaaggagtcccggctccaccgttaactagcagtggagccttcagcaatttacttaatctccctaagccwcagtttttctcacctctataatgagaatcatgaaaataacacctaatctagagagtcatgaggattcggtatctgaaaaagcaacatggcacatagaaattgttcaatagattttagctgctgctattgtcattatgatctctgtgactactaatcgtaagaatgaattgtgaagatctttagtacaggaatgtgctctttatgtctgagcaaatattttgcacattgccacagtctttatttgttagcacgcatgacatttttactttgctatgtggtcatttatagtcggttgcccctcctagattgtaagcctgctggccggagggagcagctcttctagattagcctttgcatgcaccagtagactcagaaggccttgcacttagcaggtcctcaagaaaggcttattgaatgcactgggaagttataggtggagggctgggatccagcttgctccagagtgaggtctctgcctcagaaatatcctcgcagcagttgaataagggccaggactagggtttgggatttcgcatttcaaccaggaattggagctgccaagatgctagtcacaatagtgagagccagccttccagtcgctgaatgaagttgaaaagtagaacagatttggaaaacagaagttatttcatttttcagggtgaccagattagtttttctttattttttttatattgcatattttgaattattaaaaagtaaatggttcagaacatgagattcagatttgtaaactgccagaatccaggttgaagaaacaggcagtaagagtgtcagtagaaattatccaatcatcaagggaaaaatgcaagtctgagagtctcctgacataattaaggaagtgagtcttccttatggtctagtggggccttccttctgtcacggcaattaaagacacatccctaggcacaaaaacacatcacatggaaagttggagagcccctcatttctctagtcttttaatacagcagaaaagaaaaggtacataatgcggtggtctgcttggtgaaggagactggttagctatttaaccaaacctattttctcttcctcttcagtgcccagctagaccatatttccagactcccttgcagttagatgcatccatgtgcctgaattttggccactggaatatggaaagaagtgaagtacaccatgttctaggcctagcccattaacagaacctcctgggcaatcctataccctccctcttcccatcagcctgctgaaagggaaggattggagtttctggaatagttggagggcaagatctaaggagcttgctccctgaatctgagcacctgcaggtgactcagagaccgagaactaaactactttgtgaagcctctgggagagttcagggtttatctcttatagttgttcgaattaataacattccctcagccattaataacattcccttatagtgctttacatctattggggtggacagatacaaagtaatcacccaaattacttaggcaaaagaaaaatgccgtgttcaggccgagtgcagtggctcatgcctgtaatcccagcactttgggaggccgaggcaggcggatcacgaggtcaggagatcgagrccatcctggctaacaccttgaaaccccatctctactaaaagtacaaaaaattagctggacgtggtggtgggtgcctgtaatcccagctattcaggaagctgaggcaggagaatggcgtgaatctgggaggcagaacttgcagtgagccgagatcgggccactgcactccagcctgggtgatagagcgagactccatctcaaaaaaaaaaaaaaaaagaaaaatgccctgttcagtaacacaatacaagggcaagcctaaatagattacagagtcacttttaaggagttgaaatttcaactgtgatctgaaagaggaaaatgaattattttattataaggaggcagtataataatgaagataataattggtcctatgtgacagagttgttctaaggattaagttaatgttttaaataacctaataataattatatatattaataaattagtcaaatgcacagaacattgcctaagttgtaaatgtttattatttttgttgtcttatttttttttttggagatggagtctcgctctgtcgcttggactagagtgtggtggtgcgatctccactcactgcaacctccaccccaccccccgggttcaagtgattctcctgcctctgcctcccaagtagctgggattacaggcacccactatcacacccggctaatatttttgtatttttagtagagtcagggtttcaccatgttggccaggctggtgtcaaactcctgacctcaagtgatctgcccatctcggcctcccaaagtactgggattacaggagtgaatcacggtgcctagctgttgtcttacttttgagttgtacttcctaggtgtaagtcccagctctgcctcctacttgttataaccttgggcagtgtacttaatctctctgattctcatttcttcacccataaagtattgatggtaatgatacatactttrcagagttatttatggatcccttctcagggcccaacgtaatgagtaacaaatttatggcctttttacttcaagttgttttaggatccatagagatactccaagatccctgttcagagagaccttgctgtcatacgctcaagaattaaataaccattcaaggcattgtgtgatttcatgtaaataagagtgcttgtatcactgttgtggtcgtatgttaatttgaatggtcaaaggacctttgactcccttctgaggtgctgcttagttgaatagtctacatgccagtagatttctgtagtgtggctattctatggatatctgtagagcaagatcatcttttttagcaaacccttttctgtgtcagtttgtttgaattctctaaaagctagagatttattattttggtttcattttaaaaatgcagcctcttgtgtttaaatttatacwaattactcttagatttagtccatgttaaaaagagaggattgaaaaaaakcagagagagggttggattagataagtgcttttcagatggggttggaagagcccctagaatttatgattgtctttgtcaaacaccgtgtaattctgtcctttgaaacataaaataactaacagtataattgtgtactaaataccttattattcttttaaagtaattgatttttcagattttaatatattgtgtatctattcaaaaaaattaaaaatacaacagagagaaaaaatctataatccaaccactaaaggatgcctagtgttaatatttggtaaattttctttcaattttcattttatgcatatatatttttttcccacaaaatttgagtcttaccatatataatgctttttttcttagcctttaaaaaataatgacagtgagataactcacataatataaaattcaccccttttaaagtatacaattcaatgatttaatttaccatattcatggagttgtacaatcataatcgtaattaattttagaatattttcatcacaccaaagagaaactccatacccattagcagtcacccccatcctctcctttccacccacccacccgtccctggtaactagtaatctgctttttgtctttatggatttgcctattctggacatttcatatatggaatcacgcaatgtttggccttttgtgacgggcgtttttcacttagtgtaatgtttctaaggttcatcatgttacagcatatgttagtacttcactactttttatgactgaatactaccccgttgtgtggatataccactttttatgtatccattcatcaggtgatagacatttggattgtttccaccttttggatgtatgaatagtgcttctgtgaacattcatatgcaaatttttgtgtggatatatgttttcaattcttctggttatatatatctaggaatagaaatgctgggtcatttggtaattccatgtttaatattttgagaaattacccaacaatttttaaaaaatggctgcactttttcgttttcataggctgttttttcatctaccataatatcatgattatttatatatgtcttaaattttcttcaaaaaaatttattttccttaaaacgctcataacagattatgaaagtatttttaatagctgacctacactccactggttacataagcaaattaattgttttcctaattttggacattttacattattattataaacaatgatacaatgacatttgtatgcatgtctatttctttagtgtaagtatgtagaggtagagttatggggccaaagggtatagacatatttaatatccttgatactttgatgccgcacttttctctcagaagaattaccaacctatacttccacgaaactgtgtcctttgctaatttttctaaagagaacttaacaaaaacttatatgtattagttctattgctgcataacaaatgacctcaagtgtagtggctttaaacaatagaaatttatcatctcagtttctgtagaacagaaatctggcatggtgtggctgtaatctttgctcagggctaaaatcaaggtgtcagctggggttgcaattctcacttggggctgggatcttcttccaagctcacttgttgttggcagggttcatttccttctcctactttctattcattaagttattttctttttctgtgaattaggaaaagacacacttctattctattcacctttagtagttgaatacctatgctctgcaggcttgacatttgagaaccagtgaactagattaattttaagaaccttctaggtataatattttcagtttgttagctatgtggccatctttttacaatagaaacccaaccttaactgaattggtggtccttcaggggaactcctacaattaacaatgtcaaagagacatttttttaaatagagagttaacatttcttttgcttgttactgcatgttgaaatacttttttaaattgtcaagtgctccataaacattagctcttattggcatgtatattttgggggagcagtgtgcagtctttctctcatcgcctttcaggattttgcctgtctctggaattagaaatgtcaacagcagagatatcaataatgataacaacctttcacaagtgtgttctgtggaactctagccctggaaagtattttcttgagcaaagcattccacgataatcaagtttgggaaacatcacatttccacacccctctgaaaagtcataggcatatgaaaagttcttcagtaaaaaatttgtttcaattagtagagcaagttttccttgaccatggaatgagcatgctgtgggcaatgctgacttatgtgtctccctcccttcattggtcaggttaagcagagttgagtgggtcatctaaaccctgggtgatgattaagagctcaaagtcctgggttctggtgtcctagagcaaatcacctaacctgtctaggatgctaattcacccttggtaaaatggtgatggggacttaattacacattttaaagcctcagttctaacattatggcattctatcatttactttattataaaagtataaaggaaaaaagttctcataaacacaaccttgccaaaaataaaataataacgaaaaccatagcaaaaccaaaaaataaaaatcacctgctggacctctcaggagcaattggatcatgagaatctttactcatgaatttttgcttagtcacatagcgtaaacacatgtacctatgggcatatagtttgtgatgatctgtctaaatgacagtcaggtgtatgttcctatatgtcagacccacaaagttggtggtaatgtgcaaagaaaaaggagaaaagaagtttgactggatagacacagtcatgatggagaaggagaaaactagacatgtggaaaggaaagagctgagagcmttgaatgacttggggctaaaaggcagcccttgttcattcatgaggataggaataacattatgaacggtatggtttagaccagttgcttaggctgtagtggacagatggatcagaagagagaattgccacaaaaactgggactgaggccttgacaacaacatggtgggaagagatggacagtgccaggttgatgtctagagaaatgtagaggaagggttattggaacatgatgactcataaggtctgattgttgagggagaggaagaaccagtgggaacacctgggtggagatctcagatgagggatgtggtacagttgatgatacggggagggggtgtgtgtgcagaaatagtgatttagaggtaaagtgaaagttttacctctaaattttactacatgtattgagatctggaggggctatgaggcagacaaatggagctggccaggcaagcacatgggaagtgggactgagaaaatcacagttgctttgcatattagaaatatgtgtgttacatgctaatcttatttactcatgcactattgcactgggcaggtacctctgtactccatttaacataacttctaacttgtttgagggtaaatttattagtgtttcaaaacatctgacatttatactgcttttctagccccattctatttctcttttagtgaatgtagtgagtggttgctatttcaacccaagcacttggtgttcacrtcttgcttgttccttggtggcttctgtttgttagtttctattgtggcttttgaagaaggtacctgggtttgattaaatttgttacacccttcaattatatcaaattatagtggaagtgttttttgtgttttttgtttgctgtcttaaaaaggcagcagaaaacaatatccacatggacaggtctttaacttgcatgattttgatggcatgtggtatgtaggtcaggattaggtgatgtgagaggcagtgtggcttttaattaaggcttgctacatgctggtcttggtcaagttttttttttttgtctaagcttctgctctttaagctgtgtaatggaaatactcatgctacttatttcattatgtgttctaagacttcagtgaggtgatacatggatactgtactaaaggcacacagttcttggtaccaagtaagtattcaatacattaggaatactatttttattattattggaaatggaattatgtgaggcctacaactgatagaactggttagaaattttaatttatatagaaaagaataaaggtatgaaaaataaaagagtatgggaaacaagattagcttgctgtaaatgtctgtttcttagttttgtgagcttggcaagactttacttccctgtgccttgaatgagtactcgtgtggcttgccttacaagaaaattgcaaggattagtgaatttatattgaactcctagactctctgattgcaaagtaggaaatattttttgcagctgtgatacattaacgttagcatgaacccaggcacaattactggacttagacattatttaactttttttttttttttttgagacagtctcactctgtcactcaggctagatagagtgcagtggtgtgatcaaagctcactgcagcctcaacctcccaggctcaagtagtcctcctacctcatcttcccaagtagctgggactacaggcgcatgtcaccacacccagctaatttttgtattttttgtagagatggggttttgccatgttgcccagcctggtctcaaactcctgggctcaatgatcatccacccgcctcggcctcccaaaatgctgggattacaggtgtgagccaccacgcccagcctgcccttatttaacttatgaaacctttcagcatttcttagtctccgtactgagactaagcaggtactgtactgcctcccaggggttcagcgaggaggaaactgtggggcaagggcactggatgctctgcatgtcaggtttcaagcaaaacctgctttttggttgtattttgtttcttcctgatcagagagaactttccacaaaacttccttctcacttagacaaagctcaggaaaccagttgtgtaagattataacaggatgtactgcaactgaaactcttctattggagatgtaaagattagcttaagcaggtgatcaactgacagttccccaggagtccatggaaatgggaaagacaatagcaaacccatactatgaatctgtggatggggactgaaatgttctaagggctaggcccttaaggaaggtgtccaggacaaatgagaactccttgatggcttttcattaacattacaccaagcaatagccagactttcttatgatgtgcataccattagccaaagagaaactgacttttgtacttacatgatcaagaagataatgcactgtctaggtgtggctcatgcctatagtcccagcactttaggaggctgaggcaagaggatgacttgtcaggccaggagttcaagaccagcctgggcaacacagagcaaccttgtctttactaaaaaaggaattaaaaaaaaaaaaagaagttaatccttaggattttctgtctaccttttgttcaggcaaataaggaagtgaaagttttatccaatatatttaaattgtagcacactgaaagctcaagtgcaaaaactagtttttgctgttacatgcctcttataacaccatttggagggacagctcatgggaggagtcagcaacctgagttagaccaaaaactcctgagccaaactgcctgagattgaatccaggcttgacctcttccaactacatgccgttgggcaagtttcttgacctttgtgtctcagtttccaaatctttaaaatggcagaatagcagtatctatctcagagttataaggattaaaagaattaataaatgtataatgttaagaacaatacttgatgtacatagtaagcactagatatgagttagctactattattttgataggttggtggttaaaactgttggtactggactcagatggcttgaatttgtgtcctagctctcttacttgtgagctgacttcacacagttatctaacttcttagtctttatatttgctaaatggttagactccttccttcttgttttttttcatttttggaggtgagatctcatgaagttgcccagattggagtgcagtggctattcacagatgtgatcagagtgcactacaggctcaaactcctgggctcaagcaatcctcctgcctcaatctcccaagtagcagtccactctgcccagctcaaatgattagactttttgtgcctattttattggacttatgtgagaattaaatgagaatttgcagagcacttcataattcacaccatgtctggtatatattaaacactcaataagtgttagttattggtttcttggttttgttttttttttttgttttgttttgtttttttttttagatctcagagagaatgcaattagccctcaagcagaatgttggaaaatctgagagtaatatcttttgggggcttatctccaccttcagttgctggaagattgttcccagatttgtatgcttgccactgaatgacatagtcaactgttgtctttctgagttcaccctccagaccatgatgttctatagcagatcttggcaacacatcaggttccgggaaagtacatgaatcatgatgggactctttaatctgtacctctgaacttcataaaaaacatgtgattctattagcagatccctagctaagttccatcttccctgctgttctcacatcctttcatctcctctctttacccactggcactcaccttccattgccttctcaactcttcgctggtctccatgtccaagcctcccttcctgttgtctttgatccaatccccaatcctttcccacctggactcctctcccacatgctcccttcctaatgcctcttcttcccattcttcagaacacctcctatgctatgcgcaagctctgtgtacttctgcctcactcaccactctccctcctactcttttcctttatggtggttttgtttttaactgaagacatcacatactctgctgtattcccatgtggaagtcccaccttcttctgtgggaaaggggggaattttactttctcgtcgctctgttctgagagtggatgattgaactgccactttctccctgactctcatgggatgttcatgtcatcttccaaggcccttgctatcgcattgccacatctcgtttccaccatcctagatggaatattgacaacagagcctggcacatagtaggcattctaatatgtgccacgtgaacataataaatgagcgagtgaataattgattcttcctaaaaggttttagcaactgccacactgctttttgcctatcctaagcacattttcttgtccttatttattgattcactgaatagacatctgtagagatgctaggtgtggcttgccactgggagtacagtggcaaacacgatgtggttcttctcttggagcatgccatttagtgaggggaagatatattacatacataaattaattacagttgtgagaagtgtttgaagaaaaaagtgcaggattttatgyggcctaacctacgggcgatgagggtagccagtgagggcttttattagggagtgaggttcaaatctgtacttgggaggcaatagtaattagttaaagtcaaggagggtggagaagaaggaagagtaaagagtttttcaggcagagcatgttgcacgtacaaaggccctgaggagtgaaggagcatggtacacattgaaggggctgaaaaaagaccagacacgcaggagcaggagtagggggagtgggtgagggtactgagaggtggactggggtcaggtctaggggcttcagcactcattttgttaaccttgatatttcttaacatcatggctatccactgtgtacaaaggatttttgccctccatgtttttacacattatttatttctatccctgtaaaagctctttgtcttatcttcaactcaagagtgatcacaatggtgagtttggaaacaaattagtcataataagtcaggctagttggacaattaagagcgtgagctttgttcagacgtggtggctcaggcttgtaatctagcactttgggaggctgaggtaggtggatcacttgagcccaggatttcaagaccagcccaggcaacatggcaaaaccctgtctctacaaaaaattagctgggcatagtggtgcacactgtagtcccaactactcaggaggctgaggtgggagaatcacttgatcacaggaggtagaggttgcagtgagccgagattgtaccactgcacttcagcctgggtgacagagtgagactctgtctcaaaaaaataataaaagaaagaccatgagccttacaaaggcaaagctgggtttcaggtcccagcctcgtcaccttgctgctaggtgatcctgggcaagtttgacctctctgagctttcatccgaaaatgaggacaataatctttaccatgtggatttgttaagattaaataaacaaatgtggtaaaagtgctgagtacagaacctgggttgcatgaattgttcattacatggctgtgcttgttgagggtcagggagcattcagagtccctgtgcagtaagaaacagagtagcccaagccctttttcagctgtgtsccaccttttcctggcagagccctgagcaataactggggtgggagttcaggtttattgatgttttattctgtgactgctttcttagggtatgagccaaaaactttttctcattctttgttctaaactcaagagtatttggcaccaggtttagtcctagcctctgtttctcacttgctccttagggaaactatctgtttttcctctgttagcttgtgtctgcctcctcctatttttattgtctctggctctcacatcacctaagcctgactccccatatttttatttcccaccccagcttctcacccaactcctgccttcacccgtcctggattctggacctttgtcttccctggtcactggaacctgattgtctttgtttcarctgtccaccaatttggtcccagactcttggattgcactggattggtgataccatttattccttttcctccctttgacctctcggctctggggccatagctcatgtatgacacttgctctatggagaaacttaaaccttgttttccaagcttagacccagaatcatggccaatcttctcttggccttatgtgctgtgtgcaaaaccttatgctgttgctgcttttatttcttcctggatgagaaagacatgacccgtggattatcatcatgaattctacaggcctcactctgttgtactttagtcagatcgcaggcatgaggcttattgcatcatatttgcctacccccataaaattatgaaatctctggagacagcagttgtccttaattatctctgtgtctccagtattttgttcagggcctgttatacaaaagaaggcctttaattaatgttttcagtattaattggaaattgacactctgccagaaaaggtcaacccacagcgtcagggaggagtaggaccattggctgttagagggcagcagggaccttggaataattccagaaatggtatctcagcctcaagttatttgggggaatgtcccatggccatttgacagagtcagtgaggtggccaacctctctgcttggggaagactttctagataaccattaaggcacaaaaattgctgtgttaatagcctttccccctcctttaacctgtaaaagataagtctgtgtttgctttgtcagtgtcctctctttaaagaggcagtattttggctagctgagagagagaagctaagttcatctataaaacaatctatactctcagggggaggagaagaggcacaaaaatcacaaagatctatgtggagacagcaaactttggggaggtcattttgcagaagagtgttctgcagcagctaaaggataaaaggaattggagaggaaagggaaagggtgaatgggcccctctgatattctctaacaaaagcaaataaaagatttagcttgtgaattagctttctctgtctttttcattgttctgtcccttgcatcaggcacaatgcttggcacatagatagctctcagttaatatttattcaattaattccttaaataatatttgtggctgttggaattgtatccttcaacaaatgatgctgcccagactacaagacctatagtcacacaattcacagtgttatggggcttggagcacgatcttttgagaccctaactctggtatggtggaggtattaatggagaggcagggagacatgtaccaactcactcccaacttcacagtgaagtggccatgcccttctgtgcgttagttcaggaccaaggacagcattccttggacgctccccctcacattttaatgcactattcccatgcttgcgtgtgatttcaacatcctgggccccttgtctttccattacacctgctctgcaacttcccgactgggatcaatctaatactgacttctccacttctagatatagacggctaagtactgctggagagaaatgacaaagctaaacttttggatgacacacaatttcatggtttgttatctcagctccaccaagcagtcctaaaatgtcccttgtagtcactctttatcccatacccacaatggtattccaaacctgcatcactccagctattcgcacgtttgccttcctgttctgtctccatatatgactttgtctcctatttccagggggaattgaggttacaaagtgtgaattccttcaacttcctttttacactcactttgctttctttgttcacccttaaaggaaaaggtgtcccttggcctcttcaaaacaaaacccctatctctgcttctgattttcctccccaaccctcaggtcctctaggaccagamcctgttacctcagatattctctccttcttcttgatctctgctggatcttcctaacatactggttagtgacccggacaaccatgagactctgtcataatcacaaggacttcttatttaaatatagagatttgggtaccctgtttctagctgactgaatcagagtttttggaggtgggccctggaatctacatatttaaccaggattcctggttcagaaagcaccattaaaagctctgcctttactcttgctgcccccaaacatcctgaacccaggagccagaaagacctcttcataatgcaaatctgatcatctcattcattccttgttaaaagccagagtttttgtttcctttaaataagtcaggttcaaggcaggatacacatggcacatcaaactggacaatatgaagagagtttaatgctggtgatatttacaaaagtgtggcaggatgtgggacacaaataaggcctgagcaacaccccagggctaacagcaaagggcctgaagggggaagaggagggagcaattacttgtgcaatgaaagagggctgcttggccagatgtgaaattagtggaaagagtcatctagcctgcagcaagtggcaggaaagtacagagtaaaagaaatactccttcttcctctgcttcctccttctgaacctgggttagtgctggcctttggatgaggataagggagactggtacagtgtttacaggccagcctccagcatccagagcttggagcaggtggagaagggaggagtatgggtcttggggaaggggaacatgcaaacagaagttacatagcatggtttctaaccagcactcctaagataggggctgaacccccatggtggcacataatgtcctcttccagcaggctttgtcctcctgccttgcaccctcccctgtaacctctatgcagactggcagaagtggggctctgccagtcccaggttgtttaattgctcacatctgtcccatctctttgctcatgcagtcacctatgtctgaaatgcccactctgcttttgttcacctaaaaactcccaaacttcctgcaaaagtaagcccaagtgacaccatctcaatgaagcccctctttagccttctcagcaatagaattgaccactgcttctttcgtgctcccatcatactccacgcttctccaccattgtaatagtacagttgaccctctgttatgcatcctcggattcaagcaatcacaaatagaaaatattcgggggaaaaataacaattcaacaataaataatacaaataaaacaatgcaacataactatttacataaaatttgcattgtattggatattataagtaatctagagatgatttatgctatacaagaggatgtgtgtggatttttgcaaatagccattttatataaggaacttaagcatgtggatttgggtatctgagggggtcccggaaccaatgtcccatggataccgaggaatgactgtattaacatgtatggaatgcttactatatgcctggcactgagaagtttgcatgtgttaactaattaagtcctcataataactatattatccccattttacaggtgaggaaactgaggcgcagagtggttaagtaagtttcactggattaccaagctaataattagtagagacaggatktagagccaggcagtctgcttaacaacactgccataaagctttatggcactagtaccactcgactgtattaatttgttacatgcctatcttcctctactcgaccacaaactcaccaaggacaggacggtattttatttacctcttattcactaccctcttgccctgcccctgtgcttagcacagcttggcaaatagggagtattcaatagatgaatgagggaaatgaatgaggagtgaaagaaaaggaatcctttacaaacattccttctttatggttgagaaggctgcaactcagagaagctaaataatttgccctaagtcctagcctatgctataatttcagtccaggtcttcctcactacaatacatctttttgcccaccatatcaggctgctttcaaaaggaacacaaaattttaatgctatacagttgtccccaaataaaaaatatggcaagctggcaaaatataggttcaattcatggaattgaggtcaagatccaaagcagaaactctaccgagggaccaggcatggtggttcatgcctgtaattccagcactttgagaggctgaagcaggcagatcacttgaggtcaggagttcaagaccagcctggccaacatagtgaaaacccatctctattaaaaatacatgcacacacacacaaaaataaccaggagtggtggcacatgcctgtagtccgagctactccggagcctgaggcaggagaatcacttgaacttgggaggcagaagttgcagtgagccgagaacacaccactgcactccagcctgggcaacagagtgagactctgtctaaaaacaaacaaacaaacaaacaaacaaataaacagactagagatatggaacagaaagaaagttctaggtcagaattcaggttaatatccaaaragttgggatttaagaaccacagttctggaagcagaggacagacatttgaatagcggattattttgacagcatctgagacaatcccctctttttgaagctatcacttgagcaaacagagggtggtcaggatttaaggagtgcgtcttctgaggagcggggtggagtctaaccaaagccaggtctataggacagctctctgggggctccagttccgttattggaaataaagtaccagttaactcagagctcaactggcaactcctaaaatgaatagggaaagaggaatttctcctttcttatataagcctccttccttcaattaaaaactgttttaaagcgtgcttatcaaggttggctagtctccaaggagtgaggtaatgtgctgtaccctacagccacaggcatataccagccaatggtcagctgtcactatgaggtactgtcagccaattttaaaatggaaaaatgcatgccatgataatgacttatcttcttatctaaattttaaacagttaagatgcctggcttggaatagtaatgtatgcaatcaatcaataatcccttatttttaaacataaagaaggaggcatacattttcttattaatagaggatcagtttttatccttgccccccaacaagtaaatgttcagcatatatgttaagaacattagtgtaaggggtccccaaatatctgctattccactcactgaacccacccctctctgctaatggctccatcctaaggaggaagagatggrcttccctctctttcccaggaatgctgatcccccagcacaggctagtttgttcttcctagtgcctctcagctggccccttctctctttcctttattactttctcagtctagactctaattgttcagttactgggtcaattgccttcaaggcattttcagcatggagatacgctttttgagcaaaacttccaagcctgtccacaatttgatgcctctatacattgaacacttttcttgactattcctgctattcactttaattgggggaagtttccaccatggttcttacagacagaagatctgggttcattgtttattctataccttcaagccatgtctccccagcttctatcttttccctacatacaggctcaattcccatatctcttttttcttcaaatcctccccatcttaggaccctcttttgctatgaagctttccttggctgtactggccaacattaatccgcttctcctgatggcgaccttgtacatgccaggcaccgtgctagacacttcatacccaaccgcatgcttaatcttgccaacaaatctgggaggagagcttcccctttcacagaagaacaaagtgaagttcaggaaggctaagcagcttgctcaagacctgatagatagtaagtgctgcggctgagccctgatcctggagttactgtgaaattaacccctattccaccaagacgtagtcatccagcttgggcctgacccatgcacggaccagaagggctggaaggagtgtcctgctcacatcctgcttccgtgtccctctcacaccatcctggctaggaatagtttcctccaaaccagaggcatcactgaagctcttcatctttttttctcctctgggaagaggagttcattacctcacttcttactccccgcacattccacctcaggctgactttcctgaaatatatgcacacatcttaagcctcctttactctctttctgcctttgtctagttacatagaaagtcttcctcgggttttgtctgtgtgtgtgtgtttggttttcgtttttttttttttttttttttgagtcactctcactctgtggcccaggctggagtgcagtggtgcaatcatagttcactgcagccttgaactcctgggctcaagtgatcctcccgctactcatcctccccagtatctgggactacaggtgcatgccaccatgcccagctaatatttttttaatttgtagagatgagctctttctgtgttgcccacgctggtttcaaactcctggcctcaagtgattctcccacctcagcctccaaaagtgctaggaatacaggggtgaaccactgtgcctagccttcctatttctttccccctcagtgctcccctccccctctatttgttatcactcttatttggccctgtcctctctcttagtattaactcttatcttcccatttttgtctcttttaacgtttctctttcatttcattgcattgaggagctgaaaaaccctggatggtgtttgagtaagagctgtgctccagggcactgttcaggaggtccagcatcattctgcctgcatttggctcccagttctgccagtttcttaccttaggcaaatggctaaaactctttctgattttcctcatctataaaatgtgcatgagagaagttactgaggctgaaatgatactcctttaatgtttgtctgttgttattgtttgcatttgaatttgaatgttcttggacagggcccatagtctctactctttacctttcctatttccaccactttgcctgaattacgcatttctttctttctttctttcttttttgttttttttgtttttttagatggagtctcgctctgtcacccaggccggagtgcagtggggcgatctcagctcactgcaagctctgcctcccaggttcacgccattctcctgcatcagcctcctgagcaactgggactacaggcacccgccaccatgcctggctaagttttttgtatttttaatagagacgggatttcaccatgttagccaggatggtctcaatctcctgaccttgtgatctgcctgccttggcctcccaaagtgctgggattacaggctacccatttcttttatttgcttggctcctatagatatttgactttgtgacctatacagacgaaagcataggaactcttcagaatgtctctttcaaattgtcatttatttctttattctcctacaaatagaccagtttattttcaagcatcaatagtgatacttacttattttttgttatgtttcatccctagaatttcaataagagttttctgtcttcatttcttatgtaatgaagagggttagatgagtctgacccaatgtcaccaggtggccttcctctttgagctctcaccagaagtgtctactcacccacacagatgcactggtgagcaatgtggagatcgctgaagagcccatggtgctgatgggggagagggtgtacaccttccctctcagtagcagcttgggcccctcctctagcatttccagctgcagagcctcttttgtcagggagcacagggtgttttctttccctctctgccccccacttcctaccccagggcacaccagttatcctggctcctgtcttcatccttccatatccagtttcccaccccaaacttccagcattttctaggagtgtaactgctccccccaccaccccacccaccaaccccaggcagttcatgatcgtttctttttaaatgaacattctggcacatacattgtttttccccatgtcattacttagatttttatagactagcatagtatactaatcagcatttatattaccttttccatgagcaaacatgttttgaattccaagtaaccaacttactttataaacttctaaatgttatgyctaaagttatatggtgctcagtgaggactggaaattgtcaggaatggcttcatggaaagtggggcttgagttagacctagaggggtctgtagaaggaggtcagacagggaaatattccaggtggaagggtgaagatacggaagcagaattgagagaagacagttaaaaccagtatggagaagacagcattttatgattcaataaatagaagccaatcgatcaatttagttcatttcctcttcccttccactttagggttttaagtcaggaatggcaatactgggcacatgtgctacctccagcccactgcacccatggcagatgctactaatcatgacacttgtttttcatgaatttgttaccaaaacaccagaggtttggtttaggtcctactgctccccacacagaatgccaatcaccaagtcagcaagcattgccagggaagaaggctttaatcggtgctgcaaccaaggagatgggagatgaggtttcaaatccagctcctggactgacaaaaattagggtgtttatatagcacagaaggcgggaaaacaggaattagggaattaatcatgatcaatgagggatttgatatctcactgtctggttgtggtgatctattgagtttcagtcccttgtctgagggtcagttcctgaggaaggcactcagttaagacaaatacaagtttcaagtgttaagatggagggccaatttttatgtttattcagtgacccataaatatcatttctatgggaaaactgggtcagtttcaagttcagacagggcctaaaatttttttcataatgtatcataccaagcagttcttttttttttttttttttttcttgtagacagagtctccctctgtagccaggctggagtgcagtggctcaaacatggatcactgcagcttcgaactcctgagctcaagtgatactcccaacatcagcctcctgagtagctgggaccacagatgtacaccaccacacctggctaatttctatttttcatttttattttttgtagagacagggtctccctatgttgcccaggctggtctcaaactcctgagctcaagctatcctccaaagtggttggaccataggtgtgagccataacacagggcccatcccaaacagttctaccagttgatcagagttggcatgcaatgtgaaatccattttctattcatgtcctgagtttagtaaatctggtgatttttatctctaaatggaactgctttatgagtatctttattaagtccaaaatgtaaacagccatttagaacaacattaatataattactcaaatgctttacgatactatcttgccagaacatagatttcatagtgataaaccaaaacccacttaactaatgcttaaatatatttccttttaaaaggtgtcattggtctagttactaatgatattaattgctttatttcctcagatcccaattttgcattgatccattttccagggcttagtattgattttttaaagaataacttgtataatattaagtgagacagccatatcaatcaattatagtcctctcctcaactggacaatttatgccttgtaaatgtgggtctacacataatgttttctacaatgtcagtaggatttcaagtgcctggggttctgttcttgtctttgtggattcctttctctgcctgccttcttccccttctcttcttggcctaattattatctttcaagaactaacacaggaattatctttctgtgagatctttctggaatccccacattcaccatcacaattagtttctctctcctctcggttctgtagtgctttgtttttgcacctttagcagaatggctagttagtcagggatgtgcccatgtccccagctagactgggagctccttgagggcagcacgtgccttgtcaccttcttctcccctccatctaatacgaagtaggtggcagatgcatcctttccaaatgattgacatcaataagacattgaaaaaatattgggctagtagaattttaattttgtttgaacatgttaatgtccatgttggtttacttgagaacacataattggtgtaaaattaggtgacaaatttgtaaatgtggatttagggagtcattcacattgaaagattgaattctactgctgacttctactgactaaactgctggcattctgttctttacagtaaaagtgacattgggtgaaagcattggtatcggtgtctagctgttttgagctgaggctacctttgtttgaatgaagggaatatttggatcatctgactggaaatatgtatgtcatgagacaagtatgctggcacttctgttatgacaacagatgatatcctcttcctgagtgaactgggaaaggcagggagtttggggagacctgcagcatgacctgggtcacattcagaatgcgttctgctgttcagagtttccttgctcttgagtatcaccctttgcctcagtttttcagatggaaaatgggtggaagtcagtggaattattgtgtaataaaaacagctaatgcttatttcctatgcatcaagtaccatgctgaatacatgagttcatttaatcctgacaacagccctgtgaggtgttaccattaggatgcctactttacaggagaggaaatggcaccttggagaggttaagtgatgtgctcaaggccaaatcctagtcaatggaaaagtctgagacccaaattcaagtctttttgaccattggccctgtgtgtgtgtttgtgtgtgtgtgcgtgcgtgtgtgtgtgtgtgtgtgtgttacctccatgctaagctgcttctgcggtagctctrgagagcctcataaaagagctaaataaataaaaggggtacgggatatccttattagagagaagagtgtttagtaggaggttattatctgttttcttgagagaattcctggcttagagtaaagacagatgttataaaaactgtaccctggttgatttgattgacacctcaagatgttttgaatctagttacacttacattactgtcaggtgatttctgagatgttgctttgttgcagtacaagttcagaggacaaaggtcttccagggttggaggggtcagtgtgaatggagcattggaggttgtgccgccttttctgagctgtgcatggttgtcttttttcctaccagtaggtggaaatagaactgaatctttcagcacttgctctttcagctgaatcctggcaggattcctttaatttctgccatgaaggaaaaaaataaaaaacctcaggagaattttggagtgtacagttggaggactgttattctgcagactggaatacttccagtctgatggtcagataatgatttcagcctcctagaaggccagggtgctggaagcagctgctggcagccgtgggtgtcccatgagctctgctggacacccaccttgaggggggcttttcctatcctgaccacacatccttttacaagactcctcccgtcccacccgtttaaacctttgtctttactgtgaagttgtgtatcatgtttattttcagaaactgcatttctgaaattaaaatctaccaagctgaaacagcacataagtggataaagtacaagaggaaagcctcccacccacagttccctcactttctcattgtattaactgttttttgcatacctatccagactttttctataacataaacaattatatatctcatcgaaataaaacaggcattatgtaacaagtgttgttctttgctttgtgcacttatgagtgtatcagggctgcctatgaatgtgattcgctctggtgtttcccagttgggggcagtttggcccccgaggtgacacttggcaatgtctggagacattttcagttgtcaacaactggggtgacgggatgctactggcatctaatgggtagtggccagagatgttgctaaatattctacaaggcacaggacagcacctcacaaagcattatccagcccctaatatttagtactgaggttgagaaaccctttgctaggtaacctcattctttgcaatggtgcactgaattctatagtgtgaatttctcatcctatgttaatgttttcctactggcagtcacttaaggttgtttccaactcatctcacctgtaatcccagacctttgggaggccaaggtgagagaatcgcttaaggctagcagtttgagaccagtccaggcaacatagtgagaccccaagtctgccaaaaaaatataaataaataaattagccgggcatgatggcatgcatctgtagtactagctactccggaggctgaggcgggaggatcacttgagcccaggagtcaaggctacagtgaactatgattgtgccactgcactccagcctgggtgacagagcaagacactgtttcaaaaaaacaaacaaacaaaaaaacagtgttggaataaatattggtttacatctttgtgcactttgagattttgtttctgcgagataaagatacaaaattaaaatatctgaggatagggactttattttaaaagtaaaaagtactcttttacacccagaatccctaatttgctgttccaaaaagcaaaagacctaaaaacaaagtttaaaaattcacagcaaacacaggatttggtggcaaaaccttagttgaacttgtgtgaggctagtctttatttattacatttaatgtgaatatttagacatctgttgcagaaatctttatttgattatgggttactgtctcagtctctgatgatgtagttacataatatggcaccttattgactttttaaaaatatctgaattgaattctaaagctctttcagctttttggcaaacattgccatctgatagatttgtttgcattagaatggcagcctcgggaatttaatattatagtgatgtgcagcatttagtccttaataattcttatatgttgaaatgagcaggttgtggtgacttcagtgattttgttttcagcatctataacccccttttaaaggtgattttagtcctatgaagaaaaattgcatgttttcaggtcgcaattcttgccttgtgcttttccgtacaaattagcccctcagaaaacatgaagcatggtcttgaaaatcactttttgctcattttttttttttgagacagagtctcgctctgtcacctaggctggaatgcagtggtgcgatctcaactcactgcaacctcccctcccaggttcaagcaattctctgcctcagcctcccaagtagctgggatgacaggcacccaccaccatgcccggataatttttgtatttttagcagagacgagtttcaccatcttggccaggctggtcttgaactcctgacctcatgaaccacccaccttggcctcccaaagtgctgggattacaggcgtgagccaccatgtgtggcctgctcattctttaaaagattggcaatagctrcaacattttgcatgcttgctctgtttcatgcttagcaaacattaccaaatctgacctccacaacaatacctctaggaggtagtctttttgtcttagtttatctgcagggaatgggcttctggaagttgaggatgtgtgcaaagtaacatctgggaagaggcagaacccaaatctgcagctgtaggtgctacatccctccacggtgtaattagaattcactttccccaatgtggacagagttttaatatttctattaaactgtaattaaattaattaaattgtaattggtagccgttacaaaatttttgagaaaaaaaatagccccaagttgctttttctctcaaggggctacacttggacttgatggcaaataggaaaatgtcacttgagtcaagtggatattttcatcacaacattaagagaaagcattggagcaaatctgaggtcacgaagctctcccaccaaagaactaagcattatttgaaatgagaaaacattaatgtcctctctggagcctggaattgacatgaaattagggaaaagcattgagttatatttatttcttttggtttaatcccaagatgtcggttttcattatgaaaggggaggggaacatcacacaccagggcctgtcgtggggtggggagcgaggggagggatagcattaggagaaatacctaatgtagatgacgtgttgttgggtgcagcaaaccaccatggcacgtgtatacctatgtaacaaaactgtacgttctgcacatgtatcccagaacttaaagtataatttaaaaaaagaaatttaatttaacataaaaaatttaaaaacatattatcttctattctttatagcagagccagttcaagaaccctcaggaaaaattcttgccctaagccaactggaatttctgacttctgaatttttttatgtgacaggcttagcctggggtagagtccaggaaggatgcttctaggttggttttttagctgttgctgacatgattccctttgctgcctcctagctctcgaggtttctccaaaaagcatatgcaaggaactttcctattccttccttggaggagtttccaatgttccttctccactgtgtcctctgcaactcaatactaccgatttgttttaacatttcaagtttatagctgattttactattgtgatggggaatcccagggtatgaactgtgtgcaggacagttaactactcctgttatttcttggcttgctaggtttttattgttactttcagctgtctttcagccttttacccatcgtccttcacctttgatgagttctctctggtactttggtctttgagaaagacctaagtacactccccttagtccctcatttaaatgcccattctcacagcacccctgaaccttgagatgtctttagattctgcatgaacacctcacaggtccaaactcctctctgcytcaggccctttgtatgtgctagtccctctgtctgggacacactctcctagctaccagcctctttttacctggttgttaacttcagtttatgttctcagggaagccttcytagaccaccacaccccttctcctagctaagatcagctattagttgtgattctttcatgagtcagtctctaccatgagattggacatgctattagcccagggaccaagtaaaatgtttcatttcagtgcaatgactatttgtgcagtgaatgaacaaatgaggcctgtacttctctggattccgagtcagcttctctgcttttagactttattttccagacctacattcttactgaaatatgtgtgtttcctcacatcattcacctgtccttttcactggcccccttcaccagcctttacactgtttccattgtaggcccagcctgcactctcaaaaacagagttatccaggcacttctgtattctgttgtttcttaatatcaacaggttgttttagagatagtttgtttgcttgtgtttatttattatggatatttcaagaatactgggaaagcacaaggagcttatgacaaatagccatgtaccactgcccagacttgcaggtggaaacatttgcagtatttgcttcaaagaaataaaatgttacagaaacagttgaagctcctactctctcctctcccctcagagctaaccactgtgtggacaattgccacatgaattgttggaacacctcaaatgaaagtaaataggaaacttgacattttggctagattatgggaggaaaatgttatctcaatcttgtttttttaaatatttaactgatttctagtaaagttgagcatttttaatgtttattggctacctgggctgcttctatgaattacatgtttatatctttttccattttacctatttgccatttttctatttatttttcttcttggtttgtaaagatctctgtatatttggattattctgttgcctgtaatatgtgttacaaataccaacttctaatccataacttttcatttagttttgtttatattatcatgtgttgtgtagaaattttaaatttctttgtgatctaatgaacatttttcttcatgatttctgctttttatattttaggaaatccttatgctgagattgtgaaggtattctcatcaaaatgttttaaatgttttgtttgttacattttaacctttcattcatttggaatttatttttgtaattaggtagaaatctattttaaccaagctgcagtatgcagttgagtatatttcttcctttgctatctttataccactggcttgtttttcatgtcttattacactgcctagtacctctagtatgatattaaatagacatgtcctcaggcatttgctaaaccttacttaacttgattacactaataatcaataatgtaggtctgtatcagctttatagatgaagtgactgaagcttagagtagttaagtaacctttccagaatcatacagctaggaggtaattaacagagtctggggtcaaaccccagtcccagtaacttcagagtccaactgcctatactgcctcttggtctcagatgacttgggggaaaggtatccctttccaccttgcctgcttgtgcaggcatgaaattttattgaagtgatgccagagaagcacttccagtgtgtctgaagaaaactaatagactttgtttaatttagacctgccaagagtagattaaagaaccttataagtatgaaacagttcttattccagataatataagcattcactcaggtaatataatcacatctcagtggaacttcagctatagggagtagatcttcatagtaaattaacattctgaggaattaacaagtaactgcaatgccttccttcccagcctctctccatgaaaaagctgaggcaccttacaaagatcgacctaaaacaaggtgaaataagaagatgagaaaattaggacaaagagaaataatatggtaaaacagaaaataattattgccttagtgtcattggctagagtttggccaccacataatcctaagcttcctagcaactgaagcaaagaaaacctatccagctctacaattcacagtgggcacgagatgaaaatagaatggttgctagggggatactcagcttttcctgctcccgggactggagagaagcttgtgctttggtccccagggaggggccctgtgcaatcacagggacagcgcttacagcatcttctcagtggtgggagtgcacctcatgtgactacattcccctctactttacctcaagctccttgaggggtgtgttcttcatcatatatcagagcccagcacagtgcctgagacatagtaggtgctcataatgtatttttraatgaatgaatgttatttgtaatttctgtcaatgaaagccaatgggtggatacaagatcaatacacaaaaattaataattttttccatacattagcaatgaaccatctggaaataaaatttctaaaagttccacttataatatcatccaagcaataaaataattaggagtaaatttatcaaaaaagatgcaagacttatccactgaaaactacaggacattgtagaaaaaccaatggcaaacatttgaacaaattcattaaaagcaattctatgtgaagcaaaaatacagagatttttaggtatatggctttctgatgatctgacttgatcaaaaggtgtaatttaaaattttaagaggaatatttaaggtgaacatagttttggcaattctctatgattatttctttttgcaaccaagctcctgataagaaggaatcacagagaattggagtttgcattctctgtttgcattgcatcagattcttggtcaagaatctgaatgttgccaataaagggtgctgttaggaattaaggtgagcccataacatatgttccgtaattgctttgtgaattggaaaggtgtgtattggataaaataacatcagggtgtatgtgaaaaatacactgcctcaaatgtttagcagtacctaattaaagacccttaagattactgattccaataattaatctgtattctgatgtataaaggtgtcggtcgttttcatcagcccatttttttggggcccacaacatatgcttaacagttccctaaacaactctataaaggaggcactgttaccatctccttttacagaagaggaaactgagggctagggaagataagccatttgcccagggttccacactagcatgtgatagaccagaacctgcacccagacatccatttgccctgctgtgcagcccctctcatttctggcctaaagatagccaacagcagtttcctctgatttgctagaagtatttttcctgttaggtatagtgtgtgcttggactttggaggcttcattttgatgttgtgctcagtatgccacaattaaagaattatcctaattttaagatcatctttccagagagtccctcagaacttcaggataaccaagtacagtctgaatgacatttgccaagtgttggcctcggaaaatttattgcttcaacaggggcctgttgccagtaatgattggccgacttttttcttgcctagcaaagactttcattctgtaaaggtaactgagagtttgtagttaagatcttggactccagactcagtggacacggttcaagtcctggcttaataatagaaccttccacatagtattattgggaggattaaaggaggctatcacatagggcacttagcaccatggggtgcttagaaagcttttaagaatggtagctgctaaaacatacaatcctttaaagttggactttggagtaaggagtgcgcttcgacaaccagcagtagctgccagcagtttagactgagaatggctctgtgcagccaagcctcctaaagccacctggaagctctccagtctggactttgaaaatttaaatatttttcaaatttatttttgaccaagtttaaagaaaagggattcccacagtgtgaaaggggctgccatagctttgccgtttcccctaaggaagggcctgagggaagcttctttttgttggtggaagaaatgaggggagagggcaagagtttggggtagggaagaactggactggaagctgagtctggtcctctttagtctgcctcttcaggcccccatccccggccacctattcctcttctgtaaaaccagggcgctggactaagaggcccttcctgtgccgacattctgtgaaaccataaacgcttgtcttgagctacagtttaatgtgagccctcagggcccttgtaagtctgggccattggaaagatgtctccgcatctttcatgtgagtcaagaggtggctttgtcttttatcttgtctggtgtccatacatcccagctttaaattcctcttaaaatttggagccagggaaaaatttctcttgctgcttaaatcttcacactgtttctgattggacaatgccaatgatacacctcagggtatttctgttattgtttcatttgccaagaatctcagagctaaatgcagtgaccagcaattgcggcttccttcaaacaagtcaggtctcaaaatctatcttaaaactgtatgttgctgtttaattttatgtactttaatggagaagccacatcaaatccatttgtggcattaaacaggaaaaatcacccatgcagaatgacatagtaaataaatgcagaaatgaatgaatacccctcctcactgtcagctggctccttctctgcccctagtgagtatgaaattacaacaacaataacaaataaaatgtataaaggacctactctggaccagtcactgttctaagtagtttatgtatattttctcattcaacaatcttgtgtttgggggtactattattgtatttatttaaamatgaggacaggcaggatttggggggacattagaccctgcaaaattctttggctttgggggtcctagtggtagagaggctttgccccatctggtactggcttgtttatgtggctaattagtaagctaaccaaagtcaaacaaccaagaaaaagacaaggaggaggaggggagaattgatgaccacagaaggcaggaaaaccctctctggcttctgactatcctgagatctactctgaactccggtactgacttgaggaatctgtggcgtctcagaggcagtccatattttggaatgtgtttgggggtagagctgtgcttggaggagtcatcccgagttcctgcagacaggactgttaggaggccagctgggctgcagggtgttccacatgtccattgaggcaccctgcctacacctgatgagtttgtagaaacattccccagcggttgcctgacttccagggctggcactaaagggggaactagtcagcccatctgaccatgagtcctaaatagttcccatggaatattcagtgctctgcacttacttctcttagcactgaatgccagaacggccactagcaggggcaggatgggaaactgtagtagccygtcacgagcaggctgatcatccagggcctggcctggaagacagactgggtaagtatagtcttcatttggccattgtgctcaactggcaatgtgcccacagtcaatatgcagatgtctagatgtggccaaataataatacaattttaaaaaacaaataatcgagaatttgcatgttcaaaatatctctcagtcaacaaatatttgttgagccatcccctgtgcccagtacaatgccagatcctgggggcatggcagcaagcaagctcgttggggacctgctgattgggagctcacagtgagcaggcaggcatgtgattattctgcaggcagtgacttctggtgtggttaagtgctgtgctggggaagctttgtcttttggaatctctttgggtagctctttaatctggagatggtatcattgctcaaaacatttttggagctgccctttaggaattgcctttagaactgatttgggtcacacagtaaaatctatctcacttttattttacggccacacccagcttgtgaccaaaaatggtattgcccagcttgacgacccattttattttctagtcttggctctgatttgcttgtaagccaaaattacatccaccctttaaagatggatatttatgaccactgagcatattagcagtaatttggataattttgaagcaatttctcacttgcctaagctcccattgtcctttatatctctgttgtaacactgtccaatctctcttgcagctgaattacctccttctgcctgtgttttccccactagggtgggggtcttggaggataggcccatatgtctacactctctgcagtgcccagcacggagcacatgttcaaaatgtgtatttattataattgaatgtatgggttgaattgaaaggaatccaagaggtgtctcaggattgctctgagtaacaggagcactgttggaatgatgggcagcccagtgggctctggaatctcacaggtctgcctccagtccctatttgtccccttgaccagctgtgtggccctatgcaaatcattcattccctcagatccttcatttcctcatctgtggaatagagataataatacttgccttactggggctattataaggacaagtggaatattcacatagtgccctaagcacagtgcctaaatggaggtgattagtattcttgtaatattggagcgaattcttgtttggatgcataaattctgattaaaaaaaaataactcacccagaagtcacattatttaaaatcatttgctggccaaacacagtggctcatgcctgtaatcccagccctttgggaggccaaggcatgaggattacttgagcccaggagttcgagaccagcctgggaaacatagtgagaccctgttgctataaagttttttaaaaaattagccaggtgtggtggcttgcacctgtggtcctagctactcaggaggctgaggtgggaaaatcacttgagcctgggagatcgaggctgcagtgagctgtgatcacgccactgcactccagcttggatgacagagcgagaccctgtctcaaaaaaaaaaaaaaaaaaaaagaaaaatcatttatcatagaaaatgtattctgcaaggaaccctagagcccatctaagtccaacctcctaattttctttttcttttgtagagagagggtcttgctctgacatccaggctggagtgcagtggtgtgatcacagctgtaacctcaaactcctgrgctcaagttatcctcctacctcagcctgtcaagtagcggagactacaggcgcacaccaccatgcccagctaattttaatgtttgtagaggtggtgggggaggggtcttaccatgttgcccaggaaggccttgaactcctgacctcaagccatcctcccacttcgtcctcccaaagtgttgggattacaggcatgagccaccatgcctgtccccaacctcctaatattaatgagattcaaaaagggaagtggactgactaaagtcattggttcatgacagaactgggccaggccagagctcttttcatgtgacgtttgatacttacccctacatttggaggtgccaccttccttgcaagggccttgcatttaggccaggagctcggatactggcacttctggacaatggtagccaagaatttaggatatgcacttggggagccacagcacatgctttgcacacccttttgcagcaacactttgtccctctgcagggtgttgagcatgctgctgtggttgtgtagctcacaaagctggcataagcaatacaaactggtggttaggaagcatgctgacaaacctggtaccattacctaatagcttaccactacttgatctctctgagcttcaccttcttcacctgtagcataggaacaataatggaatccaccctatagggttgttgtgaaggttaaatgagataatgcatgaaagtgcttacacattgcctggcacaggataaacacttcttaaaatttactattatgatcagtaatacatccaaaccaaatattctgcctctggcatctccactagtctcaagctaacctctaatctgcaatgaagccttaccaggtctctcttccaagcaggtgctgttgacagacttttacccctcccttcacaaacatgacctctcacatctcctgtttcaccccaaccatggaccacaagatcctaaagtaatcaatagcagttgcccatcaataatagggctaggaactcctgggttttcttgttcatcatcagttataggaagaaaaattggccactggcttaaacaaatactgtctttcttaggagttgtctttactttgaaggcacttagacccttgggaggctctgctattctgcagcatggcaggtgcccacatacctggatggctgccttctattattattcccttgatactgggttctttgcacatgtatacactttgggttctatttgctacccttttttttaaacttgactaaaacagtgagtaattgggaagttctgaatttctatttggaaaacaaattgatgagatcagaaaaatccaagtaatcctaaatttacagaagccagattactaaaacgcaaggacatttttttgtaatgtagaaaagttatgtttcacagaggtttttgcaatgccctgactctggatcgcagccctccctcgattctgggtattacatcatttcatttcagctaatgtaaacactcatcaccctgcacgttgcaggatttttcactgtgatttgagattgggcttcattcagtgggtcgtggtgattaatggtttcagaaggaagtgcagcaggaagagactttgcaggaatggaagaggtgaggcagctccacgtgagattctgcaaagggattaagatttggcaccaggcttggtttctgtgcagcctcttaggcagagagccccaggagagggaagcaggctgtcagctgtggctttgcacgctctcagctgtcttgaaggttggttggctcttcccgctctctgaggtacccaattttaccttgttaaaggatggatgtggatgctggaggcttaaagaagaccaggtaagggttcttgttgtctaagaaatcccccagtgttcttaatgcatggaatcctggggactgtttctttactagcaccattgtgcagtgttagccaaaatacaattcctctgagacattttacaaagaagatcagagaagtttctttccttgttaagaaagtttctaaaatgttttaacctaaaatgtttaactatagagatacaaattatttttcttgctgtgcaattcagctttgagattttttttgcatgttaatctacaagatctcgataggtatcctgagagtttattagatgtttgttttcattccttttgcaatggcctatggtatattatgtatcaacatttaatgtgatgaaaacgtctcacttatattcttcaggatactcgcttttgaataaattgctcttctttttgcagatttggtttgttgctttcttttttaccttttggcttttgtgattataatactagtaaggaatatcctgaagtagttatagttttttttctaagaggaaaaaactatactcaggagttaaatgcaaacatttgatagcatccctgattaaaatgagctacatgttttttggtgtttcaaatatgctttttaaaaaattttcagtgtaaatgtccatagttttgggaaaggtaatgcagtttatctgagtggtcatttacttataaacattaaaaggatattagacctttgataagattagctgaagaagaggtcattgaaaggagtagttttctgctcaccaccaactcatttccaaattctgttgcttttcttaaaaaaaaaaaggagttaaaaataacccagaataaaacttgaaaactgttttgtttctctgtatttggctaacttcatcccaaagtactgtgtttaaggaattcaagctatgaagactactcttgaaatggctcacataattctatctgcgaatttccataatccttttcaagagcatatgatgttttatgagtgttagggttaaaaatttcaattaagtgttcattccttctacaaccctgagagatggataacaaccctcagaaaaataacatgagaaattgtgtccgtgtcctgacgcaggctcatttttcctgtccaaagttgtgtggaaagggggcatttggcatctctccttccttatggaaggtgcggggtgtcttggtagaagtgaatgtctgtggtctttgtggtagatggatagatgcagggactcctgatcactttaatttattggaaatcaaatgttttcattagatgtaggggactgtgactctccagctttggttgagtgggacgaggtctatgcactcagtggttcttyttgtttttgttcggtgagccctttcagcctatgtcgtcctgtttttctttttggaaacagactggcagcagtctcttgcgttttgtgttactttaatctagcattttaaccattgtattttcttttagtgggatggctaatagtaaggttggcttgagcctcaatttgagaaggtgtgagaatagctgtaatctttaggaaaagaaaatcattccaagagttaaaacatgcagactcttaattgtgctgtgtccattctattttagaggaatctagacaagctattgttacaaatgcttttcctcaaatgttttcagaagaccaaaaaatatatatataattttttgtcagtgtattacattatcctcattctgtcttttttctccttatctgtcattttggagagagggaaaattgttcaggtaaacaattgaggaacaattgccagaaacatctgggaacagtcgccatggattatcttttccttcttaatgtgatcttgatgaaggttttacttgtttggtctttttatttctattaaaatggtaagacatgtgcatggttgaaaaaaattcaaacagtacaaaaagggtaaacaatgaaaagcctcctccatggcatcttaacactcagttcttccctcagcagtaaacaatgctttagatctgtgcttttcaaactttcgtatgcctaagcaacacctgcagagttggttacaacacagcttctgaggctctttggggtgtgaggagtagattgagaggggagagaaagataactatagttcattatataactatagtctacagtacctaagagacaggtggaatttgaggattctagtgacagcaggagacaggggtataaagaaaaaaagactgttgagtttcttaggaattgaaaatgctcttgagatagttggcaatgaagagtaagaagccagggtcatgaaacagagtattagagtagtgaagaaatccaaggagcttcagcataaaaatgccatcaggagaggcccagtgggtggaaatagggaaatagtcaatagttaatggaaaatatagcaatagaagggggttatgggccacctgacaaggataatgagattgagctggaaactggaataggactggccaagctaaaaaaaaatcaggccaattagcaataatgagagtgtttattcacttgtagattggcaaaatacctccctggaatgaactaggacaaatgatcatttcctgtgctaatgattttatagcagaaaagaaaaagaaataccatagaaggtacagggaggtgtctgtgtgtgagccactgtaatttaataaccctaagaaatgtaagattaacggtctgatgcaaggaacggaaaaccaagataatgtatacctgacgagaattttaaaagcatgaatagtaattatgaaaaatagtcaataaacctcaagaatcttgtcaatgaattttttttaaaaaaggttaactgccaaacaccttttcagaaacacaaaatatgacargattcaaaaaatcattttgagaggcacgggtgagaagaactaggtttttttccctaccccaccttctttgtccaataaagtaagaagaaacaaccgacgctaaacactttctttgtggcaggtattgtgtgaaatcctttatgttccttaatttattttgcccttatagctctggaggttgggatcataattattatttacagatacagtgcaaagagaattgctcaaggaagagcatattccttcataaggaagggacatctttgaaaaaataggaagttcagttggaaaaccagagaaacccacctagaaagcccagtaaaaaagttcacataatttaaggagcattctataagaaactgacattaaagcaaaaataagagagacttttataggaatcgaagtgaaggagcaaggcaaagataaggaagagacttcaataaggaagagacatctttgaaaaaaataggaagttcagttggaaaaccagagaaacccacctagaaagcccagtaaaaaggttcacacataatttaaggagcattctataagaaactgacattaaagcaaaaataagagagacttttataggaatcaaagtgaaggaaccaggcaaagatccagcagaacctttgcagatgctcagaatactccttgggcgatagaaaagggagccagcagacacaataaattatttgccttggtcttttcagaaaaatatatcaaaatcatctttagaagcagaggtactagatcaaaaagtagtaaatgaacagaatgttctagactgagttgacaaactggatatggataaatcacagggacaggttggccttcatccaagagttctaaaggaattcaagggtgaaatcatggagctgttgttaaaagcaactcatttttacttttgaaagtctagcagccccctaaaccttggttgcctggtaaaattgcccagctccatctccctgcagtacattatttaaacataaattataatctgtatgtaaaatgtaaaatataataaatcaaataatgttttcaataactgtgattttgaattcccaaaccatgtcatgtcactgttttgaaagtctttgtgaacgtttcattcttgaaattgctgagaattaccagccccttacaatcatgtaaaataagcttatcataattcatgtgaactcagtagcaaaagcacaaagaaacaaataggcagtgactcagttgcaagaaagtattcatcatacaatgttacttcactaaagggggaaaasaatcctgcagcctcagaaacagacagtcagtgtccattaattaaataaatgccatgtgaaggatttgaaaactaatcagcttttgagttcctagctgcacagtcccactgcccaatttgcctggtggtctggccctgctcccatttatctcaggccttcttccatttcttatggtcttgactctgcctaggtctgcagcccaggtgctctgttctctgctttactgcaggtggccctagttttctatcactcatgacctgcactctgtgtcgcagagtagaatagtgatggtggtctgggaagacaggatttgtgctgggtaagacagagagccaagtacagggtttgtcagggtcaaaagctagcagtaaaccagagatgtggagtggagatgaaggtcattcagtcatttaatcggtatttctttttttttttttttttttttttttgagacggagtctcgctctgtcgcccaggctggagtgcagtggcgggatctcggctcactgcaagctccgcctcccgggttcacgccattctcctgcctcagcctcccaagtagctgggactacaggcgcccgccactacgcccggctaattttttgtatttttagtagagacggggtttcaccgttttagccgggatggtctcgatctcctgacctcgtgatccgcccgcctcggcctcccaaagtgctgggattacaggcgtgagccaccgcgcccggcctcggtatttcttttgagctcctagaatgtaccaggcattgtacgaggtatacaaatatgaacaagacagccaccgtgttagagagaaacagtaaacaattacagtagagcagagttcctcaacctagacactaggttgacatccaattatttcctagaggcaaaattgcctctgtttgagaaccactgtgggagagtatgacaggtgcatgaatggagaaagaataggccattatgggagttcatagcagggcttcctaatgcagacctggaggtgaaggaagactgcctagaggaagtcatatcctgcaagacatctgcagggtgagtagccctcacatgaaagttggaagaggacagtcaaggaagggaatgattagacatggagaccagagggaggaaaccctgggtcagtcatgggtaactactcttaccagtggtggacgctccttttggtgccagccttatcaatcccaagtgccagagtttcacacccggcatctgacagcatgctttcagaggctgtgctcatgcacgtagctgccactagatgaggagtgatgctggtttagagatccttaggcttagtggtctcgggtgcaaaaggggaggaaatcgatatctaattccatagaagtagaattctcactaaattaactgcccctttcaactccaatgcctatttttgattagctaaatctaagttcatttgaccaagattaaaaacttattagcaaaaaaacttcttttcttacatggctactccacaaactgtttccaactgctggtaactgcagaccattttggcaactgtttagcaaagaatacattgtaatcatccttaaaatacctcccttttccctctattttctttatagctggctcctttctagagagagactggtctgtatttctgccagcaaagacccgttggccacatactgggtcagcctcgggactcatgcaatgacaggcacattcaagaaagatgcactttgtgtcttcacatcgtaggatcccctctgcagcatgccttttcctattggctccttgatccccttgtccctcaggggcctttcaatttctttctttctttctttctttctttcaattgttttgctttggtttcggttttgagacaggatctctctctgtcacccaggctggagtgcagtggcacaatcttggctcactgtaacctccacctcccaggttcaagcgatcctctcacctcagcctcctgagtagcagggactacaggcatgcaccactgcacctggctaatttttgtaatttttgtagaaatgaggtttcattatgtttcccaggctggaaatttcttaataacaatgattgacattcagcacttgctgtgtgtcaccagccacagggccgcatgggagaggagagagaggcactaaaaggtaggggaaaagaaaattaaagcctagcaccatactagccacttcaagtaagctatttcccttaatactcccagaaaacccttaatgggtggtgtcttcctcactttacagatgaggaccaggcctgattttatacagctattaaggggtacaggtgggatttgagccctttgtcagaccctgaagcccatgttccttctacttctgtgtttggaggaactatccaggccagtgggcctttttgtggcccagctcccaggccattaggacaatatcatcaggggtcttcaggctacaaggcagatctggagttgagggaggctgtcatcttcagctgttattgggggcttcttgtgatctacatacatccttatttgggccgtgacttcattgcccattcccagattgctgagatggcttcaaaagcaaggaccccagttctccttaccctcacagctgtcccactgcctgttcctagggcagtatggaatgatgttaaagattccagaaccaggatttagaaaatatggagactaggtacctctaccttccacttgctaacacactcaagacgaagcaacaaataaatctgttgcttatctaacagattgttttgcaaaatgataaaccagctgtattagtccattctcaccctgctaataaagacatactgaagactgggtaatttataaaggaaagagatttaattgactcacggttctgaagggctggggaggcctcatgaaacttaatcatagcagaagaggaagcaaacatgtccttcacctggtcgcagcaaggagaagtaccaagaaaaagggggaaaagccctttataaaaccatcagatctcgtgagaaatcactcactatcatgagaacagcatgaaggtgactgcccccgtgattcaattacctcccaccaggtccctcccaagacatgtggggattatagaaattaaatccccagatttgagtggggacacaaccaaaccatatcaccaaccataaaccctacctgattgtctcaactgattgccctgggcacraaatcacatgatggttatgaagacaggctgaaaagatgcacaacttaccatcgtaaagagatactgtgtcaacaataaaggggaaaaattccttattgaatttgcttataggagagacatgtttgctgagcagagggatgaaggtgactccataagaaggtgagttctagagagaaacattcatatcagcgagtctgacttcctcatgaggctagcaattggaattgtaataaagggaaactttctatacttaggtaataatgacattttgggcacaaggtattgtggcttctatgaaagaaagtaccaagaagtttataactgaaaggatcacactgattacccaactacccctctcctttaactgatgatgaaactgaggaccagagacatggatgggtagaccaagttcatgtgtagtcagagctaaagctaaggctacttgacctataaatagaggtttgtttacactgtgtgtatgggagaagggaaaccctagaatatcttttatttagattttacttgaaaattatctttgtagggagattatgtctccctccagaggctcttaaagatttggtcatcatgcactggaggtatgctgtgttgaaaagattaggacctgtgctgaagaaagcaccacacaggcacacatcaagggggaaaaaatgatttttttcacagaatttattcattaataaatctattcctttatccaaccaatatttactgtgcacccacaacagtgtgccaagcatgatgctaagtgccaggatgtagagtagacagacaagcctccttccctttgagcttccagtctagctgtgaccagacttattctgaaatgattaaggaaggtatccagtgagctatgaaaggtagtaaggcggagcttaaccatgagaactcctgagaggcctatttgagacagggatgtaacaaatgggtttcaaaatgggtgattccaagtaaaagcattaagcttggtggtctagtattttggaaagttcagctatttgcacagaaaggaaaaatgtcaaaataagggaacccagcaggagcctgctgccatcgtccaagtatgtggtgctgagcctttagccagagctggggcagtcagaatggagaggaaatgtgtcatctgagtcatgctccaaagtagcattggctgcctggcctaggggttgaaggagaggaaagagacaaaggtggtgctgaggtttctgacctacagcagtggacaggcgacagagatgagattatggagacagtgtggatatttggggaaagtgacaaggtcagtctgaagtagcctgatttggaagggactggagaatggtccaggtgagctgtcctcacaacagctgcttagccctcacttggataagtacatttaggacccttaggaagagaatgacttttcatgtcgtcaaggagactgaactctcgtggaagacaagtagttgcagaacaaaatggaagattgctggggattcaccattccttccttttttaacaaaaacttactgtgtaaaattttaaacaaacacagaaatacagagaatagtataatgaccccctctttacccatcacctagcttcaacatttataaacattgccaatattgttttatcaatctcccctcaggagtatttcccctctaccttgctggagtatttaaatcctagattttatatcacttcatgcataaatacttcttagtatatttttaataaatagagacttcataaaaaagagaactgcaatattatcatacctaaataaatatttccgaattatgatttaatgacaagcctatattcagacttccctgattgtctttaaaatggcttttaatatttggtttttggaacaggaatcagatgaggtccaaatattacatttgactgatatgtcttgtgaatcttttcatctctaatagattatctctttttattctctctttatatacactctttacttactgaagaatctgtggctatggacctgtacgacattcagctttctttggaacaccttgagttactgtttgaggcttacttcttacgaatacaacaggcataaaattgttaggtaattctgcaatgacctatcttgtattccttctgttttaggattctcagtcctccatagctgatactcctcgtggttctagggagctgagtgccaggctgtgcaagggcagcaaggattttctttactagaggtatattgagagcacagcacgtgtgaggctgtgccaggccatctgggaaatgcaggcaaagtggaagtgcctttgcttggctccaaggagcttatcacgaatttggaagaaagaagattgcatgaaactaacagattaacataggcagctcagtgttgggaagtcaagtaaagctacacttggctcaaaccccaaccttgactcttaacagctgggtgttggtgaacaagtcactttatatttctgaacctaattcctcttctttaaaatagcgaggaaaaactctgcctacttcaggattatatgaaaagcaggcatcatgggccctggagttagactttaaaccctgcttccttctgatattaagtgcctgcagtcaatgggcactttactccatgccagtcctgtgctcagtacttcatacacattacctcattttaggcctctcagcaaccctgttttacagatcacaaaactgaggcttagagaagcagtttgcatacatttacctacttagtgaattaggatttaaacccagacaaagtcaaagctcaaactttaaactgccaagatatattatttctctcgaacacatatgtcaaggttcagtattcttgtttataaggagggagctatcatatcaactttatggaattatcatggaaattaagacaaaacctactcaacagataacaaatgctcaaaagtatttgttttcatggttgttattatatcaatggttgaacaagtctgtaaaacatgaaattgtacagaaccatctataaacataataggaatgtggaaaatggagacattaacttgcattgaggcccttatggtgagagagggggcagggaggatccagtgggtctttggttatcacaggagataaaagcacattctaggatgggggagcagctcaggcagggagactagatgaatggggtgttaaataccctctttaaacttcctatttgtccagttaatgccagtgagggtttaatggtcagggagaacacacatgtgcacccctgatgccattaagaagactgtgtgggaaattacaaaaagaggttgtgatgaagagcctggtgctctgggtgggtctcagcacaacctctgtctggttctgtggtctcagcaagttactaaacttctttgcatctcactttctttccaggtaaaacagagatcataaaggactttatgatataggctatccagggatgtttgrggaattagatgaaatactttagggaaagatagtgccagaaagacccagggcagaaaccaagagaagccaagaactgaagtccttccattctcacctctatgtcaccttccctgcttctattggggttgcagtcttcaccaccccctcaccctccctaaatcaggggtaccacagagttaggctgctaaagtgacatagtgaaaatgttctcaagggttccctcctttctgcagaaacaggaccctgggtaatacatgtgagaatcaagaggagagaggttggatgtgctcatctaggctggttacttgcttttgctccccaaattttcttgcgtaagaagtttattcccaatttcttgaaaaatttagaggagggatatttggtgtaaaacaatgaaatcattggtctttgggatgttgactgagtctcttctggggaaagagaaagcagggaaggtgatgcagaggtgggaatggaagaacttcagttcttgtcttctcttggttcttccccgggtcctcctgcagataagagagattttcaagtcactaacactttggtgtgagttaattgtgtctgctcttcctcatactgtatgcagaccactatggaagatggatgcaacaggaatggcctgttggaagactggtgagcaataccagctccggagggcatacaagtttctgcaggggccacaggggagggttccctgtctggaattggaggctcagatggggcttcctccaggaagcatttagagatggagtgtgacttagctgtagttaccacaaagagggaacagcatttacagaagcctagaagtgagagagaggagtgagtccatgatggatttgggacccctgtggggagctatttctgcagatccacaggcccctcagagctctccacagaggaaatatggtcattgtttgtcagaagccctgccgaggcagcgtgaggcttatgaggaaatggggcatgagacagcaaggcgctagaagggtacttcctagcctcacctgcgcacctcacccctgtgtgcacagcacatggctcacccctcggggcttcggtgttctcatgaatgaaatgaggacttaatgaagtcctttcagttcctcagctctttggctctctgaaaatatttttaaagctgaggaaaaaaaaataaagtaatactgaaaacagatttcagtccttattaggttgcaaaatggaaacagagacagaacctggtattgagaaataattcaaagaagcatttaagaagagacatctttgatattgagtagataaagaatttatggcaattctagtctacactgggcttgagttaccaacaaacaagaaatgaatcaaaggagagacgtgaggaagaggagaaaacccccctgagaagcaagtgggcatttgaaaacaagtgacacaggtgacctcctgtccatggggtgagctactcggtaaatacagggccagtggctggcacaggaagatgtgccggagtgatggtggcagcaggagtgagtcagagagcctgagctctttggaggggctggcttgcctttggaggcagaggttgtgggcacgggaaggatgttgccccctgctctgtgtggaggcgctgaaggggtctggcccggaaggccatttgtagagctgagtgaatgccacctgggctgggcagaactggcatctcttgtgcggtggtgggcatgtgataggagacatgtacccaggacatgtacccagagttgcctggggaccacaggggctatgggtcagaaccactcggatgagtggggctgcagatgggcaggtctctgctcagcctattgagaagtgagattctgacagggaatctgagaaaggggggcaaatgggttttttctccttggcattataacatgagccagatgcattgaatcaggcatcagcattgtcacatcagtagcaacaataagcatctgttctatgccaagcattaggctatgcccattatctacattattcacagacctcacaacaacctgtctagggggcattgtttttaatccccattttgccccatattccagtgagcttcagaaacattgagccttcaaactagtgaattgcagagatgaggaaccacacccaagtgtaccaatttctctttcacgagagagacatagtctaagttgtgttttccaatcccaagcagttgcaccaatgctgtgctcatggtaatgtaaaacataagcaacattgagtattattgtttttcagtttttactttaataaatattaaaatgatacctttgtccccttttgcattttgttgataactagtgaaggtgaacaatgtgtctgccatctgcctcctgggtggattgtcttcttggctttgcccattgctaggcaactcatgtcacacgtgaagacaatacattccagtgtgtttgagtgacctgaccaaggtcacacagctggttatcagagaggcctaggccagaactcatgccagcgcctctcccatggctatcctgtctgcatcctccacaccccagccctgggctgcactcccatctcctcatcctggtgccacgacgggtcttatgagaagcccacccattcccaggggctatccagcaggaagacagaatgggacaggcggctctttgaccaaagcatcccaatgtgaaatccgtctacaaaaagccctggaatctcttctgatgaataataggtaaccactcaggcatagtttaaaatagtttggtttgttttgaaattttttaaaaatacaaagaagaaaaacagtggaggaggcagatggcatgttttaaaagagttcttgctggagattttaaaagccaatataaaaactaactaataaactgcccatcacaatctaaagatagatataccaaaaatttcactggggcacctggggacaagaacagctgttactatgaatctactgtttattaggcgctgactgtcaggtgtcatgctgagtttctgagtcttccacttattcctcacaaccacctgataagacagatactgttactgtcattatcaccattttacagataggcaaactgaggcttatttttacaagataaatggcaaagctagggcttgaaccttgggcctgactccagtgtttgtgctgttaattactgatgctaccagacaccctgagaaagcatctaagccaggggagtggcagcagccctctggccttcaagagagcaatcattgtaaaaacagattatcccagccactttgaataatagttcttgatccagaaaaaaagcacgcaaaagaccatttgtcaagatccttctcttcttttagattaacatcagtgctatgtttcagtttcagtaattgaggctcaagaaatttgctgtacaaaccaccatggcacgtgtgtacctatgtaagaaaactgcatgttctgcacatgtaccccagaacttaaagtataataaaaaaaaggaagaaagaaatttgctgtaggcaattctaagtgttgagctaaaatgaagcaaactcaagcatcttgcctccttctatccttacccacacggtgtgtgtgcatgcacatgcacacacagtgcaactcacacaccaaaacagctaagaataaaatgggttcgaataactcaagcaaagtcatttgaaattacagacttcaaggctagtaggcaccaggccaggacattctcatttcgggtctaccaacaaactatctcctttttaaagagaaatgtcattttgatttcagccatccttgcaggaggtttttcagtgtaaattcctcttagccttcctaagtaaaaatgaagaacagctgatccttgtcttgtccaatgtatgattttccctggaacttttatgagctgagtaggatgagcaagagaggaagtgttctttaagagagtcaatgtgcggccacyctcagctgcgtggtgttgcctatagcaactaagatttattttataaacacatatatggtccttactgtacagcaggcactgctcaaaacagtgtacaaatagtaacgtcctcttcacaaccctatgaaggggaaagtgaggcagaaaggagctaattaactggcccaaaatcacatcgctagagtggcaggtgggggatcagggctcaggtagcttgccttcggtgtgcattactcgtggttagtagtgttgccaatttcttctgacatagagttgattatcttcatgctgtttttctcacacagagattaagcctgaagttcatgtatcccatgaccctggggagaaaaagaaacctaactacaataagcaatgggaaatgagtcagagcctgtttattttgatgattgattttgtgagagtgatttgttgaatgaatgaaccaaatgaatgatggccttttgcggcttctgtttgccactttgatattccaggatttatttcttttgatcttctaagccatctaattgaaatacccacaaattcagatattacgatttatatttggccttcagtcccccatctgcatctggcacggtggactcaagtacagttcacctcttgtgcatttgacctctcactctaaaaataagggccagatgaatgttcatattccttatagaacagatgatggttttactagacgagtgtggtttatactttagaacagcagctgcacatatggaatgaaattatctgagtaacctattttcaaaccttgacacatacatttggcttaaaattcaacatgcgctttctcaaaaaggaagcaaatgtaaacagtcttctcatatattatcctgcacatctgaatcctatgttttatttattcgtttctcttttgagtctggaatataatcagttggaaatgaggaaggaagccccattcattcgcctctttgtgatgccatgaaartgatagcatgtttgagctgatggagggccttggaaataatcagaggagaccctttcattttatagaaggattctgaggcccagagaagtgcagtttgcctgggttcctccaatcaaaggtggkgaacatgggcttaaaaccaggttgcctgactctaggccaactgagttggacagtgttgaggtaaactctgaaaagctggtgttcctgcccaccacagctccccacctgacccctccagtctcagtcaacacccagacaccagggatcacctgtcagttatctcagaccagagatatctcttcaggcttcaggcctgtactcgctttgtgtattaggcacttatcaccactcacccaaacaatacattgactgatagcgcctccccatcgtcctgatcatctcccctaaacacacacacacacacaaaacacttttaaggcacagacccattgttctcaaaaagtagtgttgattaccttaatccttttctaaaatgctgccattgtccacttcactcactcccactcatgtatcccaatcatttagaatgatgttggcacactgaaagcactcaataaatatgtgttgaatgaatgaaaggctcctcatttcctactaaagaaattaatctccatttcttagcttggtagtcaaggccctttatcatctggcattaatcttttcccattttgctcgcttcctcccttctgtcctctgctaattaaacaaccaaatagctcttttttaaggtaaaaatttattgtttaccaataaatactcaacttattgagtgtttatgccaagccttttttcacctttttatgagtgttaactcgtttaattcacacaacaaacctataaggttggtactatcattattaccattttacaaataaggcaattgagccacaagttaagttacctctctatgatcacacttttaagatgaggcagagctgggattcaaactcaggaagtgtggcttcacatcccatgcatgtagccactatggcatggctagctttcctattggtttatttttagttataaacttcaacagtctggaagtacataaaaagtaacaatttttcacccacttcaaaaagaatttagataatatgtattcttccagatgcttttcttatgttaactagtatatttacataattttaaaaccaaaattatacatactacaacatgccttttaaatttactatatttttgagatatttccataaatattcctacacatatctcttacatatatcacagccacattatttttcattgttgcctagtatactcttgtatggatacacaccataatttattttttcagtccctgttgatgaacacttcagttattcccaagatttttcccttaggaacaatgctggagtgagcatctttatatatctatgtgtgtaatgctaaatatttctgtaattcagattcctaaaaaatgtgattgctgagtcttggggtatacacacttaaaactgtgatagatactgataaatggcccccaaaatgctgtcctcccacaaatagtgtcttgcagtttgccaatttatcctcccacaaatagtgtcttgcagtttgccatgattcccttttcctctgcacacaaatttgggaattgaatgcttccttcttaaccgttccagtcctctcctctctgggagctcatattctctgcttgtcatgcctctatgcctctctttttgcacagtgaatgtattttttcttcccctgctgccccataatatcaaatcctccttgttaactgactggtgctcgtgttgtctcttgtttctctctctctctctctctctctctctctctccccctcccctcccccccccaacacccttttctccttcccctctcccctctgcttccttggttatataaaaccatagtagtttctttgatacaatattcacatcaaggagtctcggaggctacctagagaagagtgagttctgactgttgctggcagtggcgacgctttatgtggtgccaattgggttgatgtttgtagcctcagtatttggctgtgttgttaaagatgaccccatttggtatccgttatttagggcacagcagtgagtgtgattaagaaaggaacaaagagttacaaaggaaagcaaaactggagaagagccttttaaatgatgacggagatgagaaaaaggaagataaaggcaagacgttgctgaactcctccttcatgccaccccccttgcttggtgctttacatacattattgcatttaatcccccagtgagaacagactaaacagattaggaatggtctgtctggaagacaggaggaggatgtgagcaaagtttctgaagtcataaatagttctagtgtaaaactacaaagataccccatgaagttacagcagagtgagtttaggacaagagaaaggtagtaagtagtacttccaaatggggctagtaaacagtggactctgtaaccaaaagtgtgaaaagatggacaatttaaatagcttttttttttaaggttttagacaactgcatggtaatacattgctgctggatttctaattggagttaggatgcttggagtctttagacattcacattgaggtcaaggagtctaaccgtatgtacagccctgtagtccatgaaggtatctgggggagcagaagagaggacattcagggcttctgtcatctctctttaaaccagaatctctctacttcttatctcttgaaagttctgggcttctacatgagatttcctttgtgagggacaaaaaaaagttgttatttatttattttttttaaagtctacaaacgattgcattagttgtttgactccactattccagacaagccgtgggctggatggactgtggatctaaccaacgggaggaaattttactcatggaccaaggctccaccattgcttctctcaattccatagcacaagctagagtctgacagccttgtagctcagccctgacctcagtgaggtgaggacttggtgaggtgagagaaggcaagtgcagcagcaagaactgctcctgtttctgaaagaacatcccagtccattggtaaggcctcccaaccccattccaccctatcacaagcaaggtgggagctcccctgcagccagtgccccaagtgccttgcctactgtgtgcctttgaaggaagagtcagggaggccaggagcctcagcctgagccctggctcacaggttctgtgctgtcaccgagctacttacttcacycctactcttgcctggtctttcccttgggctgtgagtcagaagacagtggttgaagtctctgcttactcattttgcagccataagattctctagcactcaacctctttctaacccatggtttcatctgtgtttctgtaacaacttctactaatcaggctgctaggaggactgactaagataatgcaaacaaaacacttttcagggtgcctgctgcatggcgaagcctcagtaaatggtagtattggtggttgtagttgggtcatttttataccccctccaccccctgcttcccctgctgatatcttggttcctagccctgtgacttggaagagacttgggcttctgctatgatacctgcttctgagccagtaatccccaaccctgacatctgcctgctgccttccagtcccatggcttgccccatcaatactgattttctgtccttgattatacctgcagtgacatcacaaagcacaatacatcatacacagtgatacccagtaacagccctctttgtatgttactgcatttaaaaaagaactttgtctcttaagagcacttcacatatgtcgtttcatatttgatagacttccttttctgcaattgaaatgtagaaatatcaatgacttgtcctaaggtgcaggcttgctagttgatatagacaagcagaaacccaggtcctctgattcccaacttctttttaccatttcctgccatcttttgagtttttgtatctagatatattggcctttgctttgatttatacagacttgtaggtttccctgtgaatctgggagcaggatgaaggtaagagtttaacttctgctttgcagttatactgtagtcagctgctaaaacataagaatactatctagatgttaatgaaaaaaatattatttttgacctatttttgtttcaaaatgttctggacttatctcaataaatagctgttaagatgtttatcaaatttattgcattccccaaaatctaaataaatacctgagataaaaagaaaatgtgacccacttgaggttaggagttcgagaccagcctggccaacatagtgaaacttcatctttactaaaaatacaaaaattcgccatacatggtggcacgttcctatagttccagctacttgggaggctgaggcaggagaatcgcttgaacctgggaggcagaggttgcagtgagccaagattgtgccactgtactccagcctgggtgacagagcgagactctgtctcaaaggagaaaatatggccaaaaaataaaattaaatacaataaagctaaacttccttaataaatggaaaatggcattaggcttataagaaaggtattctacataaaatattttgcctctgcaaccagcaaattctaccatattaaagacatagcagttttgtctctctgtgccaaaaatcacaagaacttttattcttgttctcatgatccactgcaatgttctctattcagaaagctctgggatgttttttttttttttcctggctcctttgatgttcctcagacaaagactcttgaagttgcagatttgttgtatgtttttagaccagtgcagagatggggttcagaggaacatttcacatgggctttgatgttagaatcctttggcaaatcaygtttgcctttcaaattgatatcaggaggatagaccctttcctttttttcttttttctttttttttttttttttttttttttgagatggagtctcgctctgtcrcccaggctggagtgcagtggtgcgatctctgctcactgcaaggtccacctcctgggttcatgccattctcctgcctcagcctcccgactagctgggactacaggcacctgccaccacgcccagctaattttttgtatttttagtagagacgaggtttcaccgtgttagccaggatggtctcgatctcctgacctcgtgatccgcctgcctcggcctcccaaagtgctgggattacagctgtgagccaccgtgcctggccaaggatagaccttttctaagggttgtcaaggaaataacctcatgtgcagaaaaagttttatgcacaaatatgtgtatcacaacagctttacaatagtgaaaacccagaaacaaattaatagtaataagagaatggttacttacactgttgtgaaatcatgaggaggaatctcacatagaattgaaagtgaggtctaaagaactttatagtaatatggagaaaaacttggttaatacattatgtagaaaagcagattataaatgttgtgtaatatgacatcacaactatggaaaactacacagtggtagtggtatcacaggtgatcttttgcttttctttattttccagtttttctgtaataagcaagaattttgaaaattggaatgggaaaagggtgttttactgaaaacagaagcatcatccttctctgttggtaattttcagcttgatttggtttgtagtgctgcagaaagtgcttttgatttctctagaacagtgtttctcaacctcagctagttgtgggagcagccctgtgcactggacaatgtttagcagcatcattggcctcaacgcacaagatgcctgtagcatgccctcagttgtgacaaacaaaaatgtctccacacattgccaaatgtccctggtgtgggtggtcgtgataaaataacgtctggttgagaactgctgttctagaatcatgcactgatacatcccaaatacccactccctgggagactcagcaagaggtggcagtgggtattcagttgtacacagcaatggagtatgtagaaatctagaaattcgttcactcwctcatgagacatttattttccagaaaggtgtttggcatcagaaaaatgtggcaataggaagcagggttccttccagctgcagggtgggattcagtgggaggaattcagccccttgcgggcagaggtggagtgaagaaagggcctggcaagcaacgaggctcactaggactgagacaccagcagttttggtcacaaaaggaggtggaagccaaattcccagcctgagatgggaatgaaagcagaaatgcagttgactagacattgtggagcctgcaccagagaactaaagctccttaaattcctcctgacagggaacaggattgtcctcagagcctagggcagccctcagcttgctggtggaaggaatggggacttggataaggagttggaagagtgggtggctagagagcccctgcaaggcactgcccactcagtagtgatacttactgtgaagggccgtgggtctagactgaggcatttacacttggttctggaagagaggaaagaagccaaaccagttttcctataggaaagatctctagaagtggatcaaagaatgtacactttttgaatttcgatgggtagtactcagttgcctttctaaatgccagtataatgatcaatggattggatattattttggcattttatagtgcttgaataataagtttattattttaaatgtttgtagtgccgccgaaggtttataaaggtttatggctgtcrcagttttgctttcatgacctgttgttgatcgtatctttgatttatgtgaggcctagacaggaacagaatccctaatcatgaaatttttcctatgggaaaatacatcttgctttatgacaatctactttatgacgtgctttccagaaataatgtgtggcaaaatgtagaggtcatctataaagtttctgtttgttttatctgttgtgaatttccatgatttttgtccccctttgatggctaatttattttccatcctgtattagagatayatatttaataaaatttaaaatattcttttttaaaaatgcatgaagcacaaggaaggtgaatgggtgattaacaagatagtgattcagattgaatattaaatgtatctcatttcatgaaacaaatgcattcaattaggttgaatgatatgaaattttgatttttctaggtcaaaaacagtcaaatatcagcaattttatatggctcagtgtaatagtaatgttggctataaagaaaatttttgtgaaatgaatattctgttttttattgctttcttaaaaattttgaggttcatttccctgaagacagagttgaaaactttggctgtgtatcatgctgggcatggctggaattcaacaaattattcttgctttgaatgattgtttccattggaacaagagttcccaacgaaccctggctgctcatagaatcactggggaaactttaaaagatataatccatggctccacacagataaatcagtacattggatatggtatgcagtggggcagggctcaggcctcagtatttttttgttccccacgtgactctaaggtgcagccagtttgagaaccactgcactagaatttcattttaaggagtctcaatggagctttggtataccttagaaaaacacaatgcctttgttcctcacctacttctctatcttgctttggaccaataaggtctaaagatgaaatgtgaaaaaaatatatttaactcgatcaaccccctgctttggttttcattcaacagaacatttattgggtacctactatgtgcctggtcctagggctggggactttgatgaaacagatgaatgctgagttaaagaagaattatgcctcttaaagaagccagggattatatgaaatgtcccaaacaggcaaatctgtagcgatggaaggtagattagtggtggttgcttagggctagtgaggatgggaaagtagggagtgactttaaatgggtatgagacttaacttggaggtgaaaaaaggacctaaaattgattgtggtgtaactatattaaaaactattgacttgtgtactttaaatgaatraattgtatggaatgtgaattatatctcaataaagctgctgttaaaaaaaaaaaaaagccaagggttccttttggcatgaggacttcacactgaataagtaaattaggaacagcagagaagaaactcagtactatacacccattcctttcaaaactaatagacaataaaatggggacaataactgagggcaaaataaagtaaatcctggttggagatgtttagttaccacctgtattccaaatagcacctgagtgttcagagggtggatgggctgggagccgtaggtgagaaaaagacaagaaccttcatagaatgtactgtatgccaggcactatgctaagtgctctttgtatgtattcattcattcaattatcacacagttatctccattttactattttgaaatggaagcacagagaagtaactgccctaaggtcatatagctagttaagcagtgacattaagactgccttaaagagtggaagtattctaatagcaatgtgacgatgcgggaatgggagtggcagtgggcagggaagcttgggcttgttgaggggatggatagctgtcacaatgtgttcaactagggtaataatggaggagggggtagaagggtggacagtgaggggttactgaggaactcccttgaccatgctaaggaaacaaaatgcagcagatgggcatcgttgaagataattgaatcaaaacaaggcttaagaaggccaagttcagttttctaaatgcacagatacatgcatgtctcaatgagtgtctctctgggtctgttccctgggtcttactatgacctgggctctggggagaaattactaaaagagaagtcacaatgacctagggaaattgaaaagcctccataggacctgccttagaaccttacattctttgaatggttgcaaagtcgcagccgaaggtgactagcccagaatgctcagaacatttggcatcaaacctggactagaaggtaaacctctagaggggaaggaaaagtctattgtcccctgacctcctcacttcccccaaagtggagcaaattgggctccccagcttttcttttccttctcagtgagacagatgagtatagacagtaattgtgcaggggcagaggaggagggagggacattggagactgtgtccacccaggatctcaggctaacagtctgatctctaagccaaatgctgcacttcagagccagcaacttttcatccacacgaatacattccccttgacctttccacgtttgctttgtgctctcagggctcagttcattcatgaagatttttccaagatctgctctgttctaacttccttttatgcttggatttttataccaagcctcatagcacctcccatgtaggtagcatttcctactattataatctccacattacccccaaataatcgagagttcacagtatagctgttcttttcttattttgttgtgccctagacctcatgataggttaatcctcttatgccctatgtttttttttgttgttgttcttgcacagttctttttttttttaatactttaagttctagggtacatgtgcacacatgtgcacaacgtgcagatttgttacatatgtatacatgtgccatgttggtgtgctgcacccattaactcatcatttacattaggtgtatctcctaatgctatccctccccccttcccccatcccacaacaggccccggtgtgtgatgtcccccttcctgtgtccaagtgttctcattgttcaattcccacctataagtgagaacatgcgatgtttggttttttgtccttgagatagtttgttcagaatgatggtttccagcttcatccatgtccctacaaaggacatgaactcatcattttttatggctgcatagtattccatggtgtatatatgccacattttcttaatccagtctatcattgttggacatttgggttggttccaggtctttgctattgtgaatagtgcggcaataaacatacgtgtgcatgtgtctttatagcagcatgatttataatcctttgggtatatacccagtaatgggatggctgggtcaaatggtatttctagttctagatccctgaggaattgccacactgtcttccacaatggttgaaccagtttacagtcccaccaacagttaaaagtgttcctatttctccacatcctctccagcacctgttgtttcctgactttttaatgatggccattctaactggtgtgagattgtatctcattgtggttttgatttgcatttctctgatggccagtgatgatcagcactttttcatgtgtctgttggctgcataaatgtcttcttctgagaagtgtctgttcatatccttcgcccacttgttgatgaggttgtttttttcttgtaaatttgtttgtgttcattgtaagttctggatattagccctttgtcagatgagtagattgtaaaaattttctcccattctacaggttgcctgttcactctgatggtagtttcttttgctggttcttgcacaattctaggcgccagtagccattcattccccattgaagtcagcctgttcccagtgactgtggcttcctcttgactcctggagcaccagctgcctgaacctctctcttctcacttattgtttcctgcctcgtgttaactttccctcttacctgcctgccttccagccatccttggtcatgcaagagacactcaatgcaacagggatgagtcactgattaatcagcaagcactttatagggccatgatgcaggcgataactgttctgatgacagacactggggagaacagcgggcatctccagggcttgctcatctctgacatgctgtccctgatccttcctcctgctccttcctctctccatccttttcttcaaaattctatctttctgtctttcggtgattctgtcgtcatcaccttcctcccctgccacaaatacccctgagtttcttaactactcacaatttagatctcatttatccttttatttgctatatctatagaacttggcttttcttgttttctgtgtcttgtgtctgaatataataatgatgtttaacattctgtgtgtgacctctgactgattttggaaatgggaaaaggatccatggcattggtaggaaaaggttgccaagtctgccttaagaatttttaggaatggcagggcatggtggctcatgcctgtaatcccaacactttgggaggctgaggcaggcagatcacctgagattaggagttcaagaccagcttggccaacatggtgaaaccccatctctactaaaaatacaaaaactagctgggcgtggtggcaggtgcctgtagtcccagctactcaggaggctgaggcaggagaattgcttgaacctgggaggcagaagttgcaataagctaaaatcgcaccactgcactccagtctgggcgaaagagtgagactctgtctcaaaaaaaaaaattttttttaagaatatttgcagggtaaaacataaaaaagctgatgatgaaacctgttggatgaactgatgaaaccccaaatttacccagccagtaatggccatgcccttcaccttctaaaagaagtgcatttgcttctccctggcctcatgttgaagaattggaaaggagcaatttggagagagtgcaataaaagaaaagacaaagagtttctgctattatccctgcatctctgacttcccacagtctgtttttcagctgttccctgtccactcccaggacctctgcctcctgtcttatagtgtatcatggtctctactggataacagataagcaaggttgagtcatctgatatggtcatccctggatgtggactttctcctccaatcatgagcacaacatatagagctcccatcctctctccttcactctcatcaagtgaatggctcagcaaggttgggactcttgtggtgagaccagaagatcttgagaagagtgtgaggaatgagcttcccagtgaataaaaggtgacccgacttttgggccatgagtgacagaaccctccagctgaatgtgcatttgctcctgaaaaggaaccccatccaaagtagctacagaagtgatttaaacagagatgtggccccagcaagtccttttcttccagctcagcatcacattgactgtcttctttgactcctaccagctctgctgggagtgagactcagtgacccttcccttccctatagcctacccagcccacagattcatgccaaacactcgttgcactgacttcatttgtgccgtctttgacattactggtaatgtccattatatgcagatgccaaagaccagctaacatcagttcaaggaatatttcaggagttccacctgtatacaatacaatataccatgaatcactagatcatggtgggtataaaagagagaaaatccttggaacacccataagcagttgatcccagtgggttggttaggctgtagttagtatatacactgctgttgacactgcctttaattatgtgtagtcacacctgcattgtgtcctttatgagctcttagaaaataatgaatgcacccaattgtttagagctcccacaaagtgaaggacaacattatttcaaattattgcaagaagcccagggtatctggagacagggaaagctcttaagtctactttttatacaatagagcttcataccattattctgtatataatcttttcaccaaaacactgtcgcctgattgtttcaacaaaagacctctttgttttgatagccaagaaaaaccttaagctcagtagagacatgagagcaagctttttaaattacaaaatgtaagtgctaaaaccatatttttggaatgtaaattggaaggttttttaaaaaaagttttgttaactttaaaagaagttacaatttttttaaacttaagtttttaacctaagtttttataagttttaaaattttcattaactttagcattttttttctcttttcttttttaatgatttccatggagttctttgacatgcagctcagggtgaccatatctttcttatctgactatagggtaggcccaggtaagctgaaaggtgataactttcccatactcctgagccctctgaaggtcaaatatattgtgttcaacactcaacctctcaggataatcctagccctgaacataggctgatacagtttggctctgtgtccccacccaaatctcaccttatagctcccataattcccatgtgttgtgggagggacccagtgggggatgattgaatcatgggggcaggtctttttcttgtgctgttctcatgatagtgaatgggtctcataagatctgatggttttaaaaatgggagtttctctgcacaagctctctctttgccgctgccatccatataagatgtgacttgctcctccttgccttccaccatgattgtgaggcctccccagtcatgtggaactataagtccaataaacctctttctttcgcaaattgcccaatcttgggtatgtctttatcagcaccgtgaaaacggactaatacgtatgctcttctacacacacatagctgagagtctctgtaacaggacagaggtagtctatctggggatagattgaaagtccctgactcatcctcatgaacttgagtgcagttttaatgccacgacccgtccatttttttgtagttccccaatattttggaacctccttgaaggcttacctttccactgctatcttacaaaagtggagagaaaggtgacatttcctataagatgttccatctcttttaagatctatacctccaactagacaggaaaagtcctaagtcctcgcccaccctgtgggatgcttctgaaagttgttacttaccttgtgagtacaaatgaagtatatcgtctctctcctgttccaggctggtaggtaatgtgtactttgtcctttctcattggtttttattaataaaaggaaaccaccaagctataggaaatcttagaagtcatcatctctattccattggtgccttaagagaagaggctgtgtcttgtttgaggttatatcttcaatacttaaaaaaatacctctggaaggcaatggatgtcctcaggcatatgagatataaccctccagctgtatgcatgtccatatagcttgcataggtagtttgcttaggaaatgtttatgaacagaaatggttctggcctagaattgcatccacttataaggactcaaaaggttcctgtttatctccccaaactcactgctcaatctcttagcttcacccataggaaaactattttgcatacactgttccctttgcttagaacatttccccctttcttacccttcctcaaccttgccctagctaactcttactgtctttaggttgtgtcttagatgttacctcctagaagaaccttccatggcctcctaagaccctcctctgtgtatctgaaacactgtatgcccacaccaatgtagaattttatgctgtaatacaattgcccattatcttgcttaccttccctgatgctcagtaactttcttaaggacaagaagctcttttactcattattttatctctagctactggcaaactattttgcacaaaatagacattcagtaaatatttgttgtctgaatgaatgaatgaacaaagtccaaacaaggaatatattcttaggcatagacggcttatctttcagaaattaaagtgcggctactttgtgtctgcattgaatgtcagtccaagcttctcagaggattcctctggataggcaccccagcgtgggtcctagctattgcttaggacctcccagggcctgcctttctctgggtgtagggcccaggattttccccactaggctgggctttcctactattctctacccttactcaactcctccatcctgtctgggagactcaacaattcctcttccaggctccatgtcctcctgccctgcctaaacttggtgacasctctagctcctgggaatctggtgatctctattcacccaccactacctatttcatttgctctgcctgaggtgtgttcactaacaggttgttgaatatggctctacccttggatgaaacttgaaggtctgtactggttgtcttaaacagctttcagtcttattggcaggcatgaggctctgcagctgctcaattaatcaggaccagaagccaacttatgttgggtcctgtctctgagagtaagtccatgttagctcaactactgagttcgtgatccttgggggatttggagaggaatgtccctagctcctctctggtggtcattcacttgggtcccattggaagagaaacctttaagaattaaatcactgcagttttccagtagaagaaatacagtgcatttaataaggataaataactgtctgctaataattagaggaggatctctgcttgcagaccctactaattcacactctgtcctcattctcatcccctccctttgcccctggaagtgatgctcaaaggatcaagatcaaaaggcagtggaaagaaatgaaggatgcaggagaaagatggacattgtgaataaagggaagagagagaggggtgatggggaaggtaggaagatcaggacagagcaaggaacaacaggatgagattcaaaagaaagcaacatggggaacatgcaagtggtgagggctaagaaatcttaataatgaagaaaccatggggactaagaggaagttgaagaaagctgctggagcaacctagagagacagaagagagcagagaagtgagtgaaaggaataaacctgggatgagagagaggatctgcactgtaactctgatattgaccaagaggattgataacctcccttttattaaatgccacatacatgccaagtgctgtgctgaggctttgcatttattatagcatagtgggcactagcccagaatggaatccagagttgagctgtttatggagctgtgcaccagaaaacacttagatgtctacacataagttcacatgcaggagactaggagagggttgttctctccacctccagtctcagcccaggagggcagaggttggccagccacagagcccagtccaggtacttcaacaaggggagctgagtggaagaacagaagcaaactatccctgagcataggaggggctccatcaccttcagaatgctaccaaatagctaggagggatgaaggcagatggtgatggcttttgggggtaggaagttacctgaggtcctcaggccagcaggcatggtcttggagctctaaagattcaggtatttatgctattatgaccatttgggtattcagggctggtgaaactagaaacagaactcacagatgtcttatccctttgaatgcttatttataacaactctgttatatctccattaaagaaacactagttacttcccccatgctactggatggtggcactaagtacgacatgatcagtgtgacgcaaagaccatactctttccactctaccctaaggcatctcattagagatggcatctctgctgtcccatctctgctatcccatttctggttgtcagagcaatatattctaggaggtcagcctcagcctcaggccatctttaggcagacaggaggttaagagaagggaaatgcagtgctggtccagaagcaatgaccaaggccctgggagccatgaagatagaggccacactggacatttccagctgggcagagagaggaaggttagaaaccaggaaaagatgagcaggagttcagccaatgaaggtttggggcacaggaagcaaaaagcctggtcttataggttggcattggtcccctccacctgttggggacacacagaagcctggagccacaggatgtcaggaactttctgtccctttcagcttcacacatgcacagcttagcgagaacattacccttgatcctctgagccagggatcacagtctacgggatttgtgaaaatttggttttgtcttgcagggaatttgtccccatgtaattcattaattgacccattgctccttagagctgcaaggagcctggtagttcaggccattaagtcccttctgtaggcctaattcatggcctgacatcacaatcctaaaaacataatccatttgtcctgatttgattttttcttttcgagaggctcccttggcagccaggttttctcattatgatatgattcatccatatggtaattaccattagaattagtatctcagacgtgattcatctttggaaatattaagctggaagcatcacttacagaaaggcctgttccatttacagccatggggaatgtctgcagagatgctccttcatccagctagcatttgttgagttttgccctgtgctggattctgaactaggggccttgaggcgtatagagatgaataggccctagactgtgccctcagtagcttccattctagaagggagatgatagggacgtaagtgcttgtcagatggatggtacagtcagagatgaaaggtaacatgttctccttaaagtctaggatacaggttttcaaactctagcaggaatcaaaatcacctgaagggcttgctaaaacacagattattgggtcccagcccagagtttttgattcagtaggcctgcgatggagcccaagaatttgcagttccaacaaactcctgggtgaggaggatgatgctggtctggggaccacactttgaggaccatagctctaagtcttcaattatttctccactgtgccctttctccattgcttgcagcatgctaagcagtgccctgtgctggggacaaaatgtttattaaagcttggtccctgttccagtggggaaatagtaggagagtaaacagtgatttctgtacttcacagaaagtgctactagagctttgcttaaggtgtcattggatcaccaaaaagaacatgattatttcttgccggaacccagggaaggccacatggaggaggtaaaattttaataawagggatgtggattggaagaagttgtatggaagggcatttgcagctgcgaaattcccaagttttcaaatgtcctggggcatcctctaacttcttctgagatgttcccctgaagtgataaaggttcagcttacttcccatagaagcctctggcacagttctggttaattcgcctggttttagcaaagtctttatgtttgtctttccggagttctgtttggtcagtgtcttgctcgtgcatggtctgaatactctcagtagaatggaattctctgcacaggcatttgaatggaatgtggaatcatgagcagagcaaacagcagcctgctaccaaaattctcctccccatccctgccatttaagtctccaagctgctgcaactaccccctccaacagcctcactgtttttgttgactcttcaggaaattcgacagttcttatatcattgcattttgtttacacacagacacccatcagacatgaaacttctagtatcttcaaccttttagaacactgcttgtagattccaaagttagaaaagaggctcatgagactagtaaaggggtttccaaaccatagcgcagagctcttacacttcatgctgtgagaggcccctgcgttgttaccacctattaactcacaggtgacaccgttaaaataaatgtcattgtttttctagctcagggcactttaagaaccacattatggggaggataagggtgctattagaagcacatatatagtcactaatgcgaaatggcagctgatactgaaggagaatagtaataagagagagggaacaggagaagctaatgtattagagaataatgatcatcaaaataatcatcaaaattaagtttaattataccctccatctgccactgaagaaggggctgggtatgatatagggtaaaatcccagcacgctgggacgctgaggcgggaggcttgcttgagctcaggagtttgagaccagygtgggcaacatagcaagaccacatctctacaaataatataaaattagcccagcatagtggtggtgcctgtagtcccagccactcaggaggctgaggtgggaagatcacttgagcccaagaggtcaaggctgcagtgagctatgattgtgccactgcactccagcctgggcaacagagtgagaccttgtctcagagaaaaaaaaaaaaaaaaagaaagaaagaaagaaaaagaaagcaaggaagtatggattatagaacagtaacactaaaagggaccttggagataataactggccagcctcttcgtgataaagataagaaaactggggcaaagagtaggttatgaggaagarggtttcagttatttgcccagtatcacacaattacacagtacagactgtgggtctctccagggcagagtcttttttctttttaaaatcattgttctccagcatctaccatagtcgatgtaactgcaactcaatatttgtttatttaaattgatttagcagagtcaatacattaatccgtatcttggtttcttttaaaccccatgatcctttcaaatgatcaatttcatgaaaaattagtagagagaatagatcagattaagtcctttgactctaagccmatcagcaaatgataatgaaatgttgttaaactgttggtggatttatcagaaatggccaagtttggttactagcaattaaatccacatttggctacagctattctgaatactttgtaaagattttatgccatttcatatgatttatatatctagttttcagcaaatacaggtgacagtagaatgtcgcctgtggttcagatgaatccaatgtagtcagggccaaaaaaccagaggattctagccaagtttttggtgaagacatagaattgagaaattcacttattcaatcaagaactgttcattgagaacttataatgccaaacactgttctagacactgcagatacagcagtgaaaaaaagaaaatctcatgaagctgacattctaatggaaggaacagacaacaaacaacaaacaaacaaaaagtgatggagggattgtgactacaattacccctctgttgaaagtgcttcctctgacatctgtaataggattttctgtttggtttggtagttaacagcactagcttagacatggagagtcttgatgttaagtcctagctgtgtgcacattagcgccttattttttttttttgagacagagtctcgctttgttccccaggctggagtgcagtggcgcgatcttggcttgctgcaagctccgcctcctgggttcatgccattctcctgcctcagcctccggagtagctgggactacagacacctagcgccttatttttaaatgctgataatagtagaacctcttcatagagctgttctgcggtttaattgaaatcacatctcactactcagggcctggttcattttaagcattcaacaaatgatgcaattattattattattgagtcaatggacctctaagtaacacactttcttcctgttgaaagatttcagaagatatgccatcagatcttagaacctcataatttttcataagtgatctcaaaaagatagcttctgaaacagagcaagtacaaaattgaccccacttgacaataccctttttgactttagtagaagtcaagtcaagaaaaagctctggctattccaaggagctttccttctgggtgagtgctgtggatgtggtgtgtctggttgcttcatgccttttagtgcatgcaagtctttgcctttgtctccatctgaattaccccagctcttttcagcctcagtatgcttgttttcttttgttttgggcctaaactccacatcctagtactggcttctataaggcatccctctttcatgagtcacaaggaactgcaaatgccttttaaagtgtttatgcaagtgttatctaagcattgcttgcttttctctaagtcattttactgtgtcaaatcattttgcccaaaccactccaggccatgtcatttcacagcacctaccataatgggaggagtgtaatcccatggaaggatccattcacagtttgcaacattgatctatagttctctatataaagcctacatctctaaaaacttagcagtgaccaaatataacaactttgactcctttcctttcctcccaatgacttcagcaagtcctgtagaaatatattttgataatatataatagcctacaattttttactaatttatttggtctacttgtttattgtctgccttccccatgaaaatgaagctcgtcttgctcactggtagaacaccagcagttgagcttagcacagtgtatgtgctcagtaaatataaatcacttgttgagtaaatgaatgctcacatagctgtctagcaagtgtggatgccatgttgtgatgtgttggattttgtttcaaaaaagatattggcctatgtagggcagtagtctgtctagttttcagaactttccatcaccatattaaccttgagtttctctcatttgtgactgtataatttaaaactataaatcttcacataaaggaagcatatttggtcattcattagacttaacttgactattttcaaaaggaattgagaatggccatgaaaggaattatcatgaataaaaacaataacaacagcattgtaaacatcacctaaacctcttaccaagatcacccctaacagtgtgatctttatcccactgttgggctttgagtgtgacaatggatagtgcaatggataaagctggaccacagagttagagaaatctgggtttctatcctggcatagcctcttactaggtgtgtaaggctgactgtatttctctacttctctaggcttactttcccatctacaaaatgaatcaactttatagattagtgtgtggattcaattgttatgtaattaaaatacttattatggttccaaacacatcatcattgtgttagttaacatctgctgtgtagcaaaggactcccaaaacgtaccgacttttcacaacaatcatttatttagcccatgattctgtgaattagttgggtagttctagtctggatcaactgatctctgctgggccctctcatgcatctgtggcagcagttggactggcaagtggatgatctaggatccaggatggtttcattatgtgtctggctgttggcaagttatcagccaaggtgacaggggtgactgggccatggtctttcatcctcccgcaatctagttcaggcttcttcacatggcagttgttgcagagttgccaaaagcaacaagagagagcaatctccaatgtacaggtatttttcaagactgcttgcatcatattggctaaatttccattagttaaggaaatcacagttccagcccagtgtcagtgaaggaaataattcgcggccatttttgtagcctgccacaatcctcatcatcactgtcatcataaaaactagtatttgttgagcatttactaagtgccagatgctgttctaatcatattacatttatcaaagcttgtaattctagccacaaccttatgaggcagatactattatatcctatattggcgaaaaggaaactgaggcacagaatggcaaagcaacttatccaaggtcacacagctgggaagcatgggagctggaattcaaaccaatgctccagagccatacttgtaatgaccgttctctactgtctcttcttcacactctacatgtgggcttttccatgattccttctttttcataagtgagtgatctaggaagagataataccttgactttttttttttttttttttgagactgagtctcactctgtcaccaggctggagtgcagtggtgcaatctcagcttactgcaaccttcgcctcctgggttcaagtgattctcgtgcctcagcctcccgagtagctgggattacaggcatgtgccaccacacccaactcatttttgtatttttagtagagacggggttttaccgtgttggtcaggctggtcttgatcttctgaccttgtgatccacccacttctgcctcccaaagtgctgggattacaggtgtgagccactgtgcctgatcaataccttgattttgacaggttccctgaacattgccatatctaccaccagtttgtccacacttcagcatttttccaacaaagcaccttgagtttctctcatcctggattggtgtgactgggatgcatcattccagatcttggtagtaatttttgatctctttctggttctttgtggtgagggtattggcaatcgtgatggaagttcagagcttcattcacagagcacttcatcttttatttcttcagacaagtttgggggcttggaaatgtggctgataacgatgttgaaatattacttaatatatacatagcatttatatatgtttattaatagtttcttggaggtgatttgcaataccttttgatatcagagactatggctttctctctatcctcagcaactagcacaggcaagagcacacagaggacacattggaggagctcagtacatgttgtaaatatctacatccgtatctgtattttattaagacagggtcaaaaacacatatactaatggtgaccagatattggccaggtgtggtcactaaagaatggtgggcactggcatccagtggagaactcatgccccatctaacagtagaagatctagccatttgataccatgtaggaatgctcagtgttaccagattgtttcattattcaggagatgctggaacttcagatgtatatgtaaagctttcctgaatttaaacagggtatgtcagatgaaacaggtctgttgactgaatctggcccatggtcaattgatttgtgacctccctacattaggcacttgttggcacctttctattgcattataactgtcctgaaggcccgaggtggaaggggagatgcagaataaggcggagatggaacaatgagatgacaagagatgaaagacttcaagaaggatggatgattgcctatttcagagattctgcagagggcaaagaaatgggaataagaaaaggctattagattaaagtaaattaattatttggcacagcactacgtctacaggctgtgttctttaaagaaatgatcaaataacatgggaaatagttaagcaaattaaaatactttgtttactctgactctcgtaattgtctttaatattctattatgcaatgtaaatctccaaaaggagaagagatttactgagattttttaaactttcatgatcaaggagtccttaggtcatacaatcccttgtagatagaatgttttgaggaaaacaccttggaaaagctggataagagactgaatgagtcactgggagtctatggaggcctgatgtggagactggaatgcacatggtagtgagcaaatgcacaatgagccagcgcagcagcttggcaagtaaagaaagtaggccaacctattaggaactaggaattgccagcttagtaatctttttaagacaaaaccattttagcattattcctttgctgaaaacaaaccagcgaaaacaaaaacaaaaacaaaacaaacaaaaaacaaaaaaaagcatcaaggggtgccctcctctgatgggtgaaatctccttgctttaacattccaggtctcctttatcaggccagctgacctttcttattccccagttgttccctggcctttctcattccccagttatttcctatgcttactccctgctctaaactccactggctgtccttattgcttgcatggtgagttgtctccccagctgctccagttagagaaatgcctgctttccaaggcacaggtcaaaccctgctttgcctattaagccttccttagccatcaagctaccagtcagttcttttccttacacaactggatcagttacttctgaaggacttgcatgggacttagtgtgttggagatggcctgtatgatttggagccaagagaataaaactatgtcttgagatctgcagctctctacccccatttgccctcacagtacacccaaatagggttaggataatattgcccagaaacacagaagagcaagggcataactccaatcacattgcatttcatagattgtggtctatagttatacaaccacctattattcattgagggtaaaggagtgtattctcttttatagacttgctcaacagtaaagagcatcatttctagacactaggctgagtatgttacatgtttatcatggtgaatcccagaatctccctaagaatagtgttattattcccattttacagaggagggagctgtcttgaaacattcaagtcagcttgttcacacttaatgaccagctctctatctggtgaaggtcgagtcaggtgtacctgacctcatgtacctgaccccaaacctgggctctttctgtcccagcacaccatctccatggccatgctggccactagaaatttaatgacagagaattaaaggtaagaatcacactgtgccttcaagtggcaaatatataccaccagacagaggaagacagataaaatctagttagggtctacacagtttgaatatcataggactcggtgcattctggggtatcataaggacctagcacagctcaagagaggccctcttgagtgagatttggaggatgcaacatcatgggggcacatgcctggcccgcagggcagtgagagtcttctactccctggccattcgtcagtgtcaccgaaggaggtgaccttcatttccaccctactctaagctcttggcttttctgtctcctttactagactgtgaactctgaggagagaaactattttatttatccagccctgtcatagtttctggtatataaacagtaactatttgttggtttgatgaatgaatgacaagtcagccaaggcaaggtgctcaaggtgacatgatagagacagcatgatagagacagcacctttattcccccatcagagagctggattacctcactgcatgttatgtgtctcctccgtttgtttatacactatccagaagtctctggcttctcagaatgcttgacaaattccaagtcctcccttcaataatgtcaaaccttataattttcaggcctcatcgaagattgtgaaatcctgcagcagcacaagaggtgtctgctgcccctcacactttccccacatcttccaacacactgccttgcacagagcagggtctatatacatgcacattgaatgactgcattgaaatagattggagacatggttaggaacctgtcctaacagtgcaatcttcttgagacaatgcttggtgaattcgggtgataaaaggagaagaaatcaggatagtgacagtgacatagatggggcaagaagagtgagcaggatctgtcaacttattggatatgggaggtgagggaggaggaagagaaaaaatgattcaaatactttgatctcagctgacagtttgaaggattatgcccaaaggggaaatagggaagttctctttccccatgaccctctcatcctcatttcagtttaagcatggagaaaagatttcccataaaagtcaggctgaaacactccatggagggagacagacctgggacagtcattcagtaatgtccaggaaaaccagaaggaaaggtttgccttcatctctctgcagaagagctttgctctgctgaggaggagaaatttgagctgaatgtatttctggttggtatgacttgtaagttctctgtttgatagcagagttgtttgaatgacctattttataactacacagagcttttccaaatagatggtgtctgtagaatgttcaggttaatgcatgagccgagtgctcagagtgtttgcacttggagcatctgagccttctttcttaataagtcatcttggcattttgtcaacaagttaatttgcttycctaagaaactagattaatacttcctgtactttgtgctattcacagatctacaatgcagtgagaagagaagaaacagaaaatacagttggatctctactccatttcctcaccaagctcccagcctccgagacagcccatggaaggataagcgttggtccatgcttaaagcaatgtgtccgagacactgtatgtgagtatcgcgccaccctccaaaggacttcaatatcgcagtacatcaccggtwctctcctagaagcaaccacgtctttgggagcaagaagtggccttctcagtacttttggaggatccactggacgaatgatgctgaaaggtaatgcctgaaatttcacttttaactttctatctttgactacagagaaggatctaagttaagatttatgtatctcctgatggaaaattaagttcacttttcagcaactttaagtaaaagtcgcttctttaagagaatataaaaaggtggtcccttattaaaatcccctaaggtgtcaacattccaaatagtaatcattaagattttgaggccgggtgcggtggctcacacctgtaatcccagcactttgggaggccaaggcgggcggatcacaaggtcaggagatcgagaccatcctggccaacacggtggaacaccatctctactaaaaatacaaaaagttagctgagggtggtggcgggcgcctgttgtcccagttactcgggaggctgaggcaggagaatggtgtgaacctgagaggtggagcttgcagtgagccgagctcacgccactgcactctagcctaggcaacagagtgagactccatctcaaaaaaaaaaaaaaaaaaagatttttgaaactttttttcaaatgaagtaaatggttaaaacgctatctttaattttttttwaaatgattcaggcaggtagtttctcctagtggtagtttatgacaaatgtcaattactatgacaagatgctaggaaacaaatatagtcaagcagtcatattgaaaacccactgtggttgggagcagagtgaaatatagatctccttcatacatagaattaataggtgtctattgaccagaaaagccaaaggccatcttccagctactcccatcttaaaggacaagataggcaggcatcccactgaaagatgaaagccaatggagagtggggtcccttggcatatgaacttcccagctacttcccatgagcagcagacaggcaggtcagaaatggcagtgcaccaaacaacctcagaaacttgtacactgcatagctgtcacaagctgcttggcagccttccctggcaggaagctgccaaccagacagggaccatgcaaagcagcattccactgcctgggggttgccagaactcaatctgacagcagctattgtccctccatagcaggtcctgagacccaaggccagcaggccaatgaccttcctccttgatcctcagccttctccattcctacccacacacacacccctagacaggcctaagaggaatactgtaacctccttgtgtactatgttgggtgccaagttggtttgttttctggagttgcccgaacttcaggggattggttataaatgaatgaagaataacagaaggtgtgggaacactartggcttcatgtttttcagccattcaacacattttttgagcccctattaggtgttaggtgctggaaaaggaacaaaacataattcctgccctcatggaatttatagtctctaggtggtaagctgttttccctacacacaagactcaaggtttctcccctctgatgtggcacctagagagtaccaagcctgcattcttcatcatactcttcccaggaagttgggctgagattggcatgtggaattggcattgttttaatgcttgtgatggtatgccagggccttatcccatgagttaatcaacatgtgtagactaaacccctcccatttggttttcaaagtctttttttttttttttctttttgagatgcagtcttactctgtcacccaggccggagtgcagtggcatgatcttggctcactgcagcctctgcctcccaagttcaagtttctcatgcctcagcctcccgagtagctgggaccacaggcacacgccacctcgtctggctaatttttgtatttttagtagagacggggttttgccatgttggccaggctggtctcgaactcctgacctcaggtgatccgcccatcttggcctctcaaaatgctggaattacaggtgtgagccactgcacatggccttaaagtttttatgtgcctcagttaaacatatttctttaacaatcagtggaataaaatggattaaaaacccagatgggtttctcaccacaaacaatgataagtatgtaaagcatatgttagttagctcaactgaaccattccacaaggtatacatatttcaaaacatcatgttttacatgacaaatgtatacagtttttattaactcattttgtgctcagtagtgtgtaggaagaaacggatctctaggctgcccaaccaaggcaggcacgcctctagtcttccacaggtctgtggagagaaataaggaagctgctggtgtgtgcatctatggccctgatcataatttgacttcaattgtatttgcacttccctgttcgaaatagaacctcatagatcaatatttctagctctgacactcaccagactgtcagctaatgtgttatctttaaattggcgttttatgcaagagttggaagtttctttaactttttgctttgaagctctttggtgatttctgagaaccctctagaaactcctgctgaataatacaattagctggttgccttctgctccaagcttatttctgtagttctgacttactatcttggaaacatttttcaatttcagcatcctctcccatttggttttcaaagtctttacgtgcctcagttaaacatattcctttaacatgcagtggaagaaaatgcattagaaaaccagatgggtttctcaccaccaaaaatgataagtatgtgaggtaaagcatatgttagttagctcagttgaaccattctacaatgtatacatattacaaaacatcatgttgtacattacaaatatatataatttgtatttgtcaacttaaaaaaattaagttaaaaaaaaagatgggtcttcaaagtcaaagagtgtttacagaatctgtaggatcagcatattggttagtgggtcttgaactctgatggccatrtactctgccagaggatcaggagtacatgcagctgctgtgatgtggttgtsagcttttttttcttctttagtatgtgtcctgtggcatagatttggccaacagcttttagctattggggaatatataatacactcttagtcttcagtttataaatgggttatattctacaagttcatttcccaggagcgatatagaacttagaacactttcctggataagcagtattaaatgttgtgatttggttcacagactctagtcctcaaaaacctctgtaacccataacacagttgtgatctgcacatttcccacgaaataaagaggaaaacactattgttggaatactgagcattagcctcaaagaaaaagcaatagaagtgagttagaagacatttcttgttgaggggcaataattttattaaagatgagtaaagagttaaacttttcagagatttcgaaaaggagttttagccatttctgagattttagatgttggcagctgtagctttttgttatggctaattacacttcaaaacttgtacctatatgaaggagtcagaaaattgccccagtaattttttcctaatgttttttaacgagatgyttataaatggtatgaagaaggatggaaggaggtagcacaagatttaaatttttccccagagataaagaaaaaggaataagttcaaaagaataacctcttccataagagaaaacatgtttgaagtgaattaaacggagttggtaaaggtagagaaaaaggaacagggaaaaacaaatgctgtatgatttcccttatatgaagtacttagggtrgtcaaaatcatagagaccttaagtagaaaggtggttaccggggatgaggaagggcaatgggaatggggagttagtgtttacgggctatagagtttctgttttgccagatgaagagttctggagcttactggtggtgatagttgcacagcaatatgaatttacttaataccactgaattgtacacttaaaaatgttgagatagtaaattttatgttgtatgtattttatcataagaagaaataattgggaaaaagggcatgttttgcaggtctttcatccccctccctagtctattaggatgtaagaaagaaccgaaacgctcctcttctggaagtggttatgattatgagatgggggtcgtggtcacctgtactaggcgaaaatagaaggaaatgtccaacaagttgatcgttattcacaagtcaagaactggtaactcgaggcttgattgtccagaattctgcagccttggggctttatggattgatacagaaggccaataatcagaacacaaacatgcctgcttttctgccttcagtgccaccaaaggtcatctgcctataaagctgaaggtttgccaaataaccagagacactttcttatgtgaagcattgatccacaaggatatgcccttatcataagtgtgtgctgtctcaaagtggaaaaatagagcgcctttacctttcagtcaggaacctccactagtttgatacattaagatccttctggccgggcgtggtggctcacgcctgtaatcccagcactttggtaggccgaggcgggcagatcatgaggtcaggagatcaagaccatcctggctaacatggtgaaaccccgtgtctactaaaaatacaaaaaaattagccgggtatggtggtgggtgcctgtagtcccagctactcgggaggctgaggcaggagaatggcgtgaacccgggaggcagagcttgcagtgagccaagatcacgccactgcactccagcctgggcgacagagcaagactccatctcaaaaaaaaagatccttccacttcctgtccctgtgcccttttccctctccccattaatcttgttagaatctcaggactaacaccttatagcagtggcagtcaaaagaattattgacttcgataattaggaagaaattttcaaagctatcacctgctttttcttttcttttaatgttttacctactgaaaattataaaaacaagataaagttaaaagggagagaaaaaattgagataactgatggtaatgtgaagtactaaaaatggcaaaattagaaaaataaagtgatgacaagaggatttttcatataaggcagctaagtgttttcaaatgtgcatattgtaccagccaacataataaattgagtgtgttaaactcaatttttccttctcaaattgttgctgagtaaagcacataaattaaaggattaagtgttacatataaccgagacaaaacatagttattcatatttaaattgtgtaatagagtggagggaagatggacctgctgaggccagcaagacatctgccatctttctgacagatggaggccagcaagatagtgcagacacagggtgccaggaggaaagtctgttactaccatgatgagaatgttggacaaagccacccaatgaagctttaccaattctgcatgattcataatttgctgctcaactacagtctccactgaaaaatgaaaatctattgccctcacaaagccagtgctgaggagatgaccaagtaccacagtgatgactacattaaatccttgcactccattcatcctgataacatgtctgagtacagccagcaggcacagagattcaacattggtgaggactgtccagtatttcatggcctctttgagtttcgtcagttgtctgtgggcggctctgtggcaagttctgtgaaacttaatgagtggcagacagacatcaccatgaaccagactgcaccatgcaaagaagtctgaggcatctggcttctgctaagtcaatgatacagtcttggccctcctggacctgctagagaatcaccagggggtgctgcatattgaccttgatattccacagtgcatattgtgcgtattgaccttccatgccacggtgatggcatggaagaggccttctatgccacagactgggtcatgactgtgtcctttcataaatgaggagagtacttcccaggaactggggacctatgggatattggggctggaaaaggcaagtattatgctattaaccacccactctgagatgggattgataatgaatcctgtgaggccattttcaagccagatatgtccgtagtaatggagatgttccagcctagtgctgtggtcatacagtgtgactcagactccatctggggatcagttaggttgcttcaatctgaacatcaaagggcatgtcaagtgtgtggaatttgttatgagcttcatcttgctgatgctgatgctaggaggaggtgttacatcattcgcaatgtcacctgctgctggacataggaaacagctgtggccctggacacagagatccataatgagctcccatataatgactacttcaaatactttggaccagatttcaagcttcatatcagtctttccaatataactaaccagatcactaatgatgcctggaaaagatcaaacagcaactgtctgggaacctgagaatgctgccccacacacctagggcccaaatgtgggctcttgctgaggatgtaacctaraggagagtgacaacaaggacgaagaccctgacaagtgcatctccatctgttcctctgacaaacaaactgcctgtgaggccgggcatcgtggctcatgcatgtaatcccagcactttgggaggccaaggcaggtggatcacctgagrtcaggagttcgaggccaacctggccaacatggtgaaaccacatctctactaaaaataacaaaagttagctgggcatagtggcacgtgcctgtaatcccagctactcaggaggctgaggcaggagaatcacttgaacccaggaggcagagattgcagtgagctgagattgggccactgcactccagcctgggtgacagagcgagactccatctcaaaaaacaaaaaaataaacaacaaattgcctgtgaggatgaattctccgactctgatgaagagggaaagggtggctgcaagaattcttccaacttcaaaaaagccaagtgggtctaaacaggatgaaagagagaaagacccagaagagaagaagtcacagcagagaagaccaaggagaagccagaggccaaaggggtccagaaggaggtcaagttggctgagcaggcctttccagctctggcttcttgctgggtcccctaacaacttagattttatattttctatttctctagactattagtaaatttttatttactaaacataaatatcttggggactagagtgaaagacagaaaccagggtcctgagtccagggcagctgtgctgggtgagctcttccaggagctgccttgcccccctttcctccccagttcttaactttgaaccataaagggagccagggctgggtgggagggatacttgtaggtagccatatagtagttttggaaaggtgtccttattagcattctagaaggggtggctggatctccaaggatcctctgttctttccaggttcctaaggtaatattagatgttttagattgsttctgttctcatacctccccattgtcctcaagtaagccaggaagctcacactgcctgccytctgtgttcctccaattctgcaggtgcagattggtagtctagtttccttttttggatactattttctttttgtgagactttgtaataaaatggtacatttctatttttaaaaataataatacattatgtattagaaaaaaaaactaaactgttcatttttaaccagtctgagtgtgtggtatgtgtgtctgtagactatatttagctatattaaagttatttatcayatgtcagctataaatagaatattgatatgaaaacaaaaataccttacagatacaatatttttgtttgaaargagggaatattttatttcagatagaaaagtctaccagcactttgagaggtcgaggcgagcacatcacttgaggtcagaagtttgagaccagcctggctaacatgatgaaacctgttactactgaaaatacaaaaaaaaaaaaaagttaaccaggcgtggtggcatacacctgcagtcccagctacttaggaggctgaggcatgagaactgcttgaacccaggaggaggaggttgcagtgagccgagaacacaccactgtactccckcctgggcaacacagtgagactcccatcaagttttcaacttattttctttcactacaataagcttgtatattctatttgtatctttctctaaagttaatagctttgaataaaaaacaagaagttatagtaggaatacacatacacatttgaactacatgattataactcgtaaatactttagtttgtaaaggctggcttagttgacttcctcaaaatcaaaacgattaccctttacatgcctactaggcaaggaaggcatgtgcatagctctaattccaagatttgtttatttaaagaaatatcctgacttgttagtattgtgaccttgaaattattttcttggtatttaaaagtatgctttaawgtaatattgggtgtgtttctctaccagttaatcaactaaaaagtattcattagctgcccactgtggcctagtgctatggcacctaagaatggagaagatcacatctggaagtcttcaacttgtaagataatatttctcattccagagaaaatgtaatattaggtttcaggtctactgaaggagcccttaccacctaaagagaattcataaagtgctaggctgctacattaaaggtggtatgagtaggtcatagggccaggaagcttggtaggcacaggacaaaaacctgttttaggaccacaggtggtcaagtatcatccaggagtgtgacactacacctgggtgtaacctaagaatatgactccataccagttgtgaccaaggaatgtgactccgtcaccaggtgtgacctgaacatagcactccattcctaggtgtgaatacacccattttgagctgggagactgattccatttaattctcttatgtgccctaattttgctccaagaaactagcttatgaaaggaacaaattatggcctaattctccataaagttttgacaccaaaaagagagagagggagagggagagggaggagaaggagaagggaaggtgaagggaaggcgaagggaaggtgaagggaaggctaagggaaggtgaagggaaggckaagggaaggtgaagggaaggctaagggaaggyaaagggaaggctaagggaaggcaaagggaaggagaaaggaaggcagaagggaggaaagaaagaaggaaggaaagaagaaagggagggagggaggaaagaaagaaggaagggagggagagaaggaagggagggagggaggggaaggaaagaaggaagatcgggtaattgaaagttggttaaatcctaatcaatgcagtcagaaagatgactggtgaggatagcaacaccagacagacactttgggtttacatatctgagctggttataaaaatgtcaagtcctaattacagagactcagaatggaccatattgcagaaatttatttgcaaaatagttatttgaaacactgcatccaaaaaaacaaccattagattccaaaacttccctccaaaacttactgaatatttaagtaaaacaatagttcttaaaaatgccagagaatagctgcagactctgcagaagtggttacctccaagaaaggcctttaaatgtgagcctcattgtgttttggatttgagccttgacttcaacattgggtcatcctattcaggtgattgtacctctaggctttagtttctgcatctacaaaatgggaataaaagcaacaacttcggagagttgttttgaggaataagtgtgacaatgtatataaagaacttaggccaggtggctcakgcctgtaatctctgtactctgggaggcaaagccaagaagatcacgttaggccaggagttcaagacgagtgtaggcaacatggcgtgatgctgtctcaaaaaaaaaaaaaaaaaaagccagccagatgtggtggtgtgtgcctgtggtcccacctattcagaaggctgaggctgtagaatcactgtagcccaggaatttgaagctgcagtgcgctatgatcctgccactgcactctgtccgcctaggtgatggagcgagactctctctctacaaaaactttaaaaattaaaaataaaaacagcttggcatagtatctggtacctaatgtatgttcaaccaatcttatgatgatgatggtcatgctggggctgatgatggtgatgatgatggtagtaatgaggattgccaccaccatcttgaaatgccagcattccactgttcttaattcaaagactctgctgttagctcagttgtagatgtacaagaaaagacaagtaccctccaggtttccctagctgtgggcctagagcactagcaactcctgggacacctaaggggaggtatctagtggctggaggccacacctgtgtaactcctttagcgagattttccttagttcccatgcattaggccactgattaattcaatcatttgaccaatatttgttgaacatctactatgtgccaaggatataacagcaaacaaaatacagtctttactttcgagggatttacccacaaatggaggaaatggacaaataaacgtgcaaattttaagatagtataaatgttataattgaaataagcacaggatatagggccccagagggaagtccctataccatcttcattgacatctgaggtttctacaaccatttaagtacctgaagaaatctaaacaggtatttaaccagggaaaacaagccctgacccatattatgaaacttctgttgtttttacttaattctctgctgatatcatctctattttattccctccagagtagaaagatgctaagcatttactcctggtattgggagccttgtctaaaaatctatgactgggacaaaatttagtgttccagttaaaatttgtatattttaatgaagatgacttactcattacaataaaattaaaggatttttttcaatacatgacacttctacttttgagtgtttytaaattgtttattgtttttaaagagtaagcctcattttaatgagctatgaaaattcttgctcttgggaacatttatagaacataataaaatgcttataatctgtttataataacatgtgggtcagtagcaaatacttaagaggataaaaaagagaatatctcaccatagtctgagtcataatttaaacttctactggaattgagtcttcaaaccaagaaatagtgaataaattattacagttaaagtaacaaaaagatatttttaayggtgtttagattttggtaattgaattctaattacagatattatactatcatcaggaaagtctaacaagttttgtcaactggaaatatatatttggtattttgtctttttaacttcatatttcattgtgacaacaaacttaaaaaaatattttctataatgttaatgtcacaagtgattccttgaacaaatgtatgctcaaacaccactaaggatctacctttgaattttacagtcaccagaaacaccctgtgtgacagtagcgggyattttgcccctgtttatactcagagacacattttggcatcaataagcagactcatctaaaatccatttcaaatagatgttgttgtggatgatctgggaacatggagggtaagagagagtataacaagtttcagagaccctakcaactcacaagatctaggctgatacactaccaagtctagacccaaaatccttaactagggttgaccagcttgtaggagcaaagccagtatttgatcctaagcctctctgattcccaaagccatgttcttaactactaggaaacactccagtattatctcccactcagggatcccgtgtactgacttataccagtgtgtgtgtgtgtctctgtgtgtgtgtgtgcatacatggagtataacactaaatcttagatttgaatggaggttcatttgactacagaattgatcattttcccacatacctgctgcccccttgccctagagacctccagtgattttgaggatgtctgtggaaatgatatccttccattctttgatatagacacctatgagggtagtgggagtcttcccactgatggttacatgttcataacacagtcaatcaaatgggaaaagaagcagctcctgttagctgatgggccaagtaaaacacatttcactctgcaaaagaagccattgattggacacaggcagagaagtggtcaaatcaatggtaactagagaagaggggctgaaagagtgtctgggcagaagcaatcatatgtgcaaaggcccagtggcagcagggagtatgccaagtttgaagtctgggcggagagtggtgagctggagggtttcttatgccaataaagtctggagaagtcggaataacaagcactaacaggtattgggcactcactgtgagctgggcactgtgacaagtgtttttaaagtgttacctaatttaagcctcatatttttgcctatgaaaaatagagagaggcaaaacagagagaggcaaaacaaactgccagataacataggctcttgttaagggctgtagaagcaatgggaagccatcagagggttttaagcagaagtagtgacacaataagacttacatttcaaaaggatgattctcatcaaaataaagtagggatgcccccatgggcaccaccccttccagccctcattgtaccccaaattaaaatatttacatttgaaatggtcatggatattgaacttgaaaataaatgactattctgaaataaagactgagatggtgttagttgaaatgctctttaattgtttcgaggagttgggaaaaggagtaatggctactaacccagctctctctacttcctgggaactgtatttcaagacgttggacttagaaggaagcttgtggtgtagactacaaaggggaattaaaaacctgttccctccaggcccaggtggactgttaatgctccccctaccccatgccatactcactgatgactatgagttgtagcagtgttttacttatactgcaggaacacaaattccttcttcatgggccaaatccaagccacgtgtgtttttctttgaccgttgcagtactttaaaaattgggaatcttgcattaaaatgttctggcttctctggcaaccctgggccactattctcccttggcccgtgggctgacagtgatccatactaacccccacaagatgagacacaccagctctttaccacacacctggccccacctccaggtggtgtcctgttcagctctagcctcatttcctttacctgcttggtcctgcaggcatctccattttggaccctggagttgtattctgagattcacacaagctttggggcacttcagttcaaggatttaggaggctgaactgggagttgggacaaaaaggagaagggctgtaaayacagacaggtcatctgtgaacaaccttctggttgggttcttcctgggagatacaggaagcgttccaagcagggaaagcaagtgagatagtgccagggtgagaatgtgtgcagcaactgtgagacaatgaagaaatgatgcagtggacatagtgagaggtaaggtccatttggtagctgtggttacagtttggagaatgaggtgaaaatttgaacctaaarcattagagagccattgcagacccttaagcaggttgaattttgaatagtggcacattaggaccaatagcctggaggcaccctctataggaaggagagtggcacttacaaacctgaatgcttttccctggattaggaattgggtgcactgaaaatagagggccagaagccagcatgggcccacttagttttcattggcatgagacactggttacagtaaaaggactagtcttgaaaatttagcatcaccgggagaaaaatgaaatgcaataaaaattagagtcagttaagaatggaggaatttttactatgacacagcaccattgtaaaaaatctcccgcctcgtgccaaggggtccgtgctgctaaactcctcccctgagtyagtgcatttgagtgctctcagtgcagtcggcacagccagagcagctgggagcaaggccttctccaggcttacataaagcataggtcttgaccaaatgtgraaaacctttagggacatgaaaaccattagggatccgtagccctgacttgaaccaagcagaataaacaaacccctgcccaaattggaactcactggacgcctttcagagttatccaaggggaaaggctggaggcctcaagggtcttcgagtgggttaatgtcttctttcggctgcctagctcaagatggggctttatctgtgctttcctttgttcttttctcaaatgtcttaatgcctcagtggcaaatccacaaatggattgtgttttgaacctgtaatgtgtaccatactatattttccctgctaatggtatagtaaagcccgttagaccttttgttacaaaagattcaggaactgggctggaaaggttccaggtagcattcacattttccatggacagggtcttggtaagttcccaaccttatttctattttcaatatcctttgtcactctttccagcctcacgatctagttttctacacgcataatgtagagaaacgctgtgtctctctcccccaacagttaagtggcatcattttcactcttttaatcccagtttttttttcaagttgaggaggcagggccgggcatggtggcttatgcctgtaataccagcactttgggaggccgaggcacgcagatcacctgaggtcaggagtgcgagactagcctggccaacatggggaaactctgtctctactaaaactacaaaaatcagccaggtatggtggtaggcacctgtaatcccagctactcrggaggctgaggcaggagaatcacttgaacccaggagatggaggttgcagtgagccaagatggcgccactgcactccagcctaggcaacagagggagaccttgccttgaaagaaagaaagagagagaaagagagagagagagaaagagagaaagagagaggagagaaaggaagaaagaaagaaagaaggggaggcagattagagaattatgaatgttcattcatccagtaaatagtcaattgagtgcctgccgtggactagatgctatgctaggcactatattgtgacagcggagggggctggattgaagaagaatgaaacaataccctagttccctgatattcacaatctgttaaagatggagatgggcatagagatgggaaaccaaagcacagagcagctaagaaccaagccctagatggtcacaaatccatagctcacagaagtgtgatctgaactatcatggagctcttaccctgcctctagtctacctgtaggaaatataatagaatgtagcacaatataggaaacatttgcagaatgcctgccacccctgttctagctagggatgaaaacaatgaaataaagcactgttcttaattctaggagtatgatttagattaacaaagagacagacatgaaccagtgtttacattgcagcatgatacacaaaaggcaaaaattggtgattaagaatgtggagtttgatgacagatagacctaagtcccagatcaaccatatagaaactgcatgatctggggcaagttacttaactcttctcttctaagtttcatcatcttacctgtaaaataggacaatgcagacacttgcctcaggtcattataatgggttaaaaagtaaattaatgaatataaagtgattagaacactgtccaaaaaaagtggagatggagcgaagaaggcactcagaaatggcaagaacaaaggcttagmtgcaggatatgtctcaggatgggggctggagggktcatgtttggcaggagcagggaacatacagggggccttgagaaatggagctggaatggatgtcctggtttgcaggtgcattgggccctaggtcagggcaaatcttgggaagataggcatccaggacagcagctactgccagctcttgctttcaaggttcatttcttccattcacacctggcccttatcactcttccaaggtgtatcggccacaatcagttctcacctgccctagaaggtctctctggtcttcctccctagttcagttggatcatgcacgggcaaataaatcctttttctccttctctagctcaaccatgagaaagttggaattttttaatgcaaaattttcctttccaagaaaaagagagaaaggatggaagaaagagagggtagaaaaagggactataggaagtggaaggaaagggaaaaggaaggaaaggctatacagacacacagaaacacagaaacagatatgttcagcaaagcgtagacgtcatacctcatttatcaaaagtgggtcacagatcagccttgccaatggattccacttgtaggacctccagtgcttattctcttccttgcttctgccttgaatgtctggacttggagagattaaactagttgtctgagaagagttggctgccatggctattccagaactttctcacctctcacacagcaccccggatctttaatccccttggccctgttcattccactctaccttgacactggttacagtaaagggactagtcttgaagatttagcatcactgggagaaaaatgaaatgtaatgaaaattagagtcagttaagaatggaggcatttttactatgacacagcaccattgtaagaaatctacccccgtgtgccaaggggttccatgctgctaaactcctcagtcagtgcatttgagtgctcttggcacagtcggcatagccagagcagcccagaaggtggcttcaaaagcttggtgtggtcagttcacagaggctacttgaatcagtctttgagccttgactgatctgagccaatcaagttcacagaaaactgacttctaacccaaatgccatttctcaatttctgagagctacgtgcagctcagttgctgcaagtaataaaaacaacagcaataataactgccttttattgaatcaggcactacatgtcataaactgttctaagtgttttaccaacatcaaccctcttgcaactaaaagtgtggtcccagaaccatcagaatctcaagcctcacctgagactttgggtcagaaactgcattttttaaaataaaattcccagataaaaacctgggttctagttctggctatacaaccttaatcttttctcctctgccttctgtctttgagtctcttggtctcattcagtttcaaggtcaactttaaaatctcccaattcccttccatagagaaagtgtttgattctctttggcgcccagagtccatattcaacaatgataaaacccactcagattgaccagaaggaagttctggttgatgattcttccttcagagacagcaggggctgggcagtcgggtcccttcaggtgaagggattacagagtaattagatatgattcaccakctgtctcaaagtagtatcttcttgtattttttatatttatatctgtaactgtagacagaaaggaaattgccctgaaagaaataactggccagtaagtaattaggactccaatggagtgaatgagccatgtgtcttatgtgtataaatgacctatttacccatgttgctaactttcatgtgcttataaacaagtagatgttaacacactcccgatgtatatgacaacctccgtggaggtcatatggaaacatgcgggccttccactacggcccygccgctgtgctgagtgttgtatgcatgtcttctgtacttctcaaaacaacctggcaaggtagaattataatcctcatttcaaagatgggaaaactgtgacttagaggctaagttgatgcccctacaaatttcaattatttaagaaggagactaaggagagagaagatagctggtgacttcagaccctttgttgttctgaaccccaaactttcctgcctcagtctataagcccaaggccctgtggttaggcttagtaggttcrattattttagcaggctgtttgaagaagatgtagtgatcccaatccacttccactcagaggcacaccaaagtatttgttccagccacataggatactttacctttgaggagtttagggaaattcatttctgctatcttatctgtgaagagtttagggaaattgatattctgctgtatcatctcctatcttccatggtgttttgcagtccttctagctgggagttcacaggaggttgaccagatggcctgctgttctgagtgattaattagagggttaagcatctagggagtatctaagcaaggatttgaacttgagtacatcccacttcagagcccatgcctctgagcactctcctttatatgatatgaagccctggggaggcctctggttggaggaagcatctgcagtgagtgaaggtgcccaggactctcaggcctgcagccctgatttgcacagtgagagctggcagcagtctagtgggcatgggggttcacagataccaggttctggcagtctgagctgtccatggtcagctgtgggggccaacacctccttcgtctgtactgctcagtctctccagagagaggccagcagctgttcttccatgtcctgttttataccaaatcagaaagaaactgacctcaggaaggaaatttgaggtctcccccagacctgtataactcatgtgcattttctttacatgtctcattgggctggcctccatcctcccacctcccactgccatcatggaaatcatctctcacaaggccaaatagcccatctaatcctctagactttggcctgtagtgggttccataaggactccccttggtctttcacagcataggacaatcaggagcttgttgcaaatattcacttgggtggaagtcaagggaaagcaatgagaatatacatgaagggaacaattctcaagacaactggtgggcaaatggacgcaaacttagcccaagacatgaaagaataacaaatacctccaagattttggtcctggggaaatgaaggttgtgctataaaaagaacgtgaaaagttagatccagtttggatatcttgactttgagatgctgggacattcaaatagactgccaacagaagcattaggattttatcggggtgagaggtcaaaaccagagtcacacatttataagccatctgcttaactgcgatggttacagcttgaggtgagctttcttaggatgagagaggggtgtgcaaaggactgagaactgtaagttcaggctgaaaggctgcaagggggccagaaatgagcaccatggctggagagttaagaagaaagccacagtaaggtagtgtcctgagccaagactcaaagaaggtccttggggttgggcttaaagttgtagtttcccaagccccctccacaaaacaactctatggtgattttaatgcacccagtgataatatcccaaaatgaatcactagacactttggcatagtcatttttttcctattagaagtgggtttgactggctagccatataaagaagaatggaactggaccccctacctctcaccatatacagaaattaactcaagatggattaaagacttaaatgtaagacctcaaactataaaagtcctagaagaaaacctaggaaaaactctctggatgttggcctaggcaaaaaatttatgactaagtcctcaaaccaaatgcaacagaaacaaaaacagacaaataggacttaattaaactaaagagctcctggacagcagaagtgggtttgactttgtcaataaagattttctacttaaatcgtcaaacgtagcttaaaaaattattaactgcatagttaaatataaaacagttcctatacgaccttgtttattgctagattagatacatcgcataggtggaatccacatagtaagtatacaatgagtactaaatgtgtaatagcatttggtcaacaagtggaacgctgcaaatctatgaccttctaggttttggtcccatttcagttgaaaagggaaaatgaacaattatgagttccctcataaattaaactctggtacccaaactacaacaaatggttaaaagcctgggctttggagtcacctgcatgtgattcagaattctgtcctcattagttaactacctgtgaatatttggacaagttacttaacatctctgagtttcctcatctataaaatggaatgctaattgtacgtcagccacggagttgctgatagaactgaataagatacctaaataaaatttttcaagtaatatgcttagatagctaagcagcacattctgtaaatgttagcaagtgattttatcagtatcattattactgcttccttttataggggaaaaaattccaagtccatatgtgtttttctcattaacttaagtgactttgcctacccaaagtctggtacaggttatttctgcaatagtatgttcaaaatcagaaatatcatgtactgtttttaagtcatagagctattttaattgatactcgtatcatcaaaggttgaaaatgtgataataacaaacaacaataaaaggtgcatgttcaacattactttcaaaatatatatagattttctttctttaaaacaaacataatttttaaaaatatcagattgtttatgatatgaagtcatggttacagtcacattgcagtttaccatctgttcttgtccaaaatacaggtccaagttagagccagaattgcaaaacgacagtaaatgtctgttggtctcgtacaaagctcttctcagttagaccatacttaaacatgtaatatattcatataaaaatgaatgtagagttaaacatgaaaatcaatcaatgcaatatatcatatgaatagaacaatagacgaaaaccacatgggcatctcaayagacatagaaaaaggatttcacaaaatccaacatctttttatgaaaaaaaacactcaacaaaataggaatagaaaggaacttccccaacctgataaagtgtatctatgcaaaacccacagctgacatcacacakgctgatgaaagactaaaaactttccgcctaagatcaagaaccaaaaaagatgtactgtcagttctagccagggcagttaggcaacaaaaataaataaaaggcatccagataggaaaagaagaagtaagactatttctattatcagatgatctactcaaagatagacaatcctaaggaatccactaaaacactattagaattaataaatgagttcagcaaggttgcagtgtacaagatctgttgtatttctacaaaccagccattaacaatccaaaaatgaaatcaagaaaaaaatccatttatagtagtatgaaaacgaagcaaatacttaggaataaatttaacaaaaaaagtgcaagacttatatattgaaaactgcaagatactgttgaaagaaattgttaaagacctaaacgaatggaaagacatcctgtattcatgaaatggaagatttagcattgttcaaatggcaatatctttgcaaagcaatctgtagattaagtacaatctctatagaattcaacctgtcttttttgcagaaatgaatagggaacccagaatagccaaaataatttttttaaagatttcttatttcaaaacttactacagagctatagtaaccaaaatgttgtgatacaggcataaagacagacataaagaccaatggaatagaacacagagcccaaaaataaaccctaacatatatggtcaaataattttcaacaaagatgccaaaaccattcaatggggaaggaacaagccttccagtaaatggtgctggggaaactggatatccatatgccaaacaatgaagttggacccttaccttccaccctgtataaaagttaactcaaaatgaatcaaagacctrcacagaagacctagaactataaaactcatagaaaatatagaggaaaagcttcacgacattgggtctggcaatgatttcttggatatataccaaaggtacaggtaacaaacaaaaaaatagataaattggaattaaaaactttcctgcatcaaaggacactatcaacagagtgaaaaggcaacctacagaatgggagaaaatatttgcaaatcacatatataataagagattaatagccagaatatatagagaactaaaattcaacaacagagaacccaacaacacaattcaaaaatgggcaaaggacttgaatcgatgtttctctaaagaaaatgtgcaaatggccaataagcatgtgaaaagatgcacaacatcattagtcgttaggaatattaacatcaaaaccataaagtacaggacrggcatggtgactcacgcctgtaatctcaacactttaggaggccaaggtggaaagattgcttgaggccaggagttcaagcccagcctagtcaacgtggcaagacccctgtctctattttaaatatatatatatacatatatatatatatatttatttaaaactataaggtaccacttcacccactaggatagataattgggggaaaaaaagtaagaaagaaaactagtgttgacaaggatgtggggaaattgaagccctaagcattgctgttgggaacttaaattggtacaacccctgtaggaaacaattggaatgtcctccagatgctaaacataggagttaccatatgatccaacaatccactgctagttatatacccaagagaagtgaaaacatacattcacacaaaaattttatccaaatgctcgtaacaacattagtcataacagccaaaaaatgtaaacaaaccaaatgtccatcaactgatgaataaacaaaatgtggtrtatacatacaatggaatattattcagttattaaaaagaaatgaaatatttatacatattacaacattgataaaccttgaaatcattatgctaagtgaaagaagccagacacaaaaggtcacatattctatgatcccattatatgaaatgtccagcatgggcaaatccttagggacagaaggtagactagtggttgtcagggcctgggtgagagggactgggggagtggagtgatggccaacatatacagggttacatgttttaggaggtgatgtacatgttctgaaattgattatggtgatagttacacaactctgtgaatatactaaaaaccatgaattgtacacttttttttttgttcttgttttttaaaaaatacagaatgcttcacaaatgtatatgtcatccttgcgcaggggccatgctaatcttctttgtatcattccaattttagtatatatgctgctgaagtgagcacaaattgtatattttaaactgtacactttagaaagttaaaaaaaaaagagagagagagagagacagggtctcactctgttgcccaggctggagtgcagtggcgcaatcatagctcactgcagtctcaaactcctgggctcaggtgcccctcccacctcagcctctcaaagtgctggaattatagatgtgagctactgtgcccagcctagaaaataaatgttacggtatgtgaattatatctcagtttaaaaaaagaatggacataaatagcttagcaatgttttagcatgaaagaatttaactctgagaatgttctgacatcttgatggggtgtgataataatgccacagtggaagggatgtgaatattaacagaaaaaaaaactgttttcctctacactcacaacacttctgacaccaaatgtgtggggttttccataccaagaatgtattctccgtctctcctgacaccaactgggcgtcttataacacaattctgacattttccacctggagctagcatcagacaccacgggttaagtaggggctcagtgccacaggattgctcccacttcagacaccaatcacaagtcctgggcctttggtatttctgaccaaattggctacaaactgggggtcttcatgactgtcttctgaggttcgatcatttgcactaatgggctcacagaactcagggaaacactttacttactttaccagtttatgataaaggatgcaaatgaacagccagatgaagaggtgcatagagcaacgtgtggggaaggaagtgtggaggttccataccctctctgggtgaccaccttcccagcacctccttgtgttcattcacccagaagctctgtgtacgccatagttgaggaatttttattgaggcttcatcacctcagcatgattaatttagtcagtcttcagttcctttcccctccctagagsatggtgggtggggcttaaacttccaagcttgtaatcatgccttggtttttctggtgcccagccctcgtcttgaagctatccaggaacccaccaaaagttacctcattagaacaaaagacactcctatcactaggaaactccaagagatttaggaccatatattagaaaaaaacatgctcctagagttttaggagccctatgtcaggaactgggagcagagaccaaatatatatattttttattatgtcacacatattcttttcatagagagaagagctgacgagttaagaacagcctttttttggtgttttttggggggcgaggtcttttttaaattgggggattcattagtacagtgtgtggcaggatgatacagacattttatatgagtaagtgaggtatcacttgggatcttaaaaaatattttctttttattatggtgggcaccacaccaaagggtgcaagttgcaggttataaaaacaaagcaaaagtttccatagcctgaaatggttggaaatatgactgagtctcctcgtcgagcttctaagatgaaaggccccagaattccctcttcctcttgcaaatgttgaattaatgatgataataagatggctgactattgagggctgaatgtgtagtaaacattacatgctttttcttgttttaatttccccatcatcactgtgacatacccatagttgtttagaacatacccaaggtcatgaagcaagtcaacaactgagctgggctgcgatcacacatacatgtgagtcccaagatcccactctacttctactctgggggagctgcccccaggagcttacagcacctgagatcctaaccacaccagtaagggaggcagtagagtatggaggcagtgccctggactgggagtcaaggtccctgagttctggtccacctttgccactaatcagctctgtgaccttgggcaagaggcttggacaagaagttcagaggcatggttttctgatgtgtaaagtgtggaaaattcatcccagctatccctgtagttccttccaactcaggcattcagcccaagtcctgcctcattcaccctctgatttgtacattgagactaaaaggaagaaaaccttcgagtcagtgtaggctggtgatttcaagatgctggactttggtgttgggctgatgtggcactggttccattatttatctcagtgtgatgttcagcaagttctttaattgtgtccccatctgctaatgggaataataacagcgtggggtgctgtgctgtctacatagagtggttgtgaggattgagtgagatctcggaagagagctttaatgcaattcctggcacattgtaagtactgagatgttatattattatatgttaaataatattataatttatttatgatgatgattgttgattgttataaaacagagacacagaatcctttcagaataattagtgtaggttagctcacccaggtcagactttggagctcagattgcctgcttatgctgagttttgaaaccattccatatctagaaggttagccatacctcaggactatgctgctgggtaagagggcatcagattgtcaccaaaaacactccagagttcccctcttgtaaactttgagtcagtaatgccatcttcccctatatgagacaacacactattataacttactgtgtgaattttgactcaastattcctttttacccaatgtaatcagaaatagatgagtgatcagtgacagatactgataaaacagttaattaatttgccataaaaagaacagatgagaaaatgctgctccctggaaatttcccaatgtgggtagggaatttttctctttcaatgttatttaacataataagcacagataaagttatatttacaagattgtttatcacggtgttattataatggtaaaaagttgtaaatataagagccatcgaaaatctaatattcaaagaatagcttcagagtcgggggaaaagtgcactatagagtttttttaagttagaaaaaaatgtgttctctgatcctaattttgtgaatattgtgtgtgtttatagaaaaatatgaaatgtaacracaaaaacattagcagagattacctctgggtatgagattattattttaaattttcttcttctttttctttttttttttttttttttgagacggagtttcgctcttgttgcccaggctggagtgcaatggcgcaatctcagctcacctcaacctccgcctccygggttcgagcgattctcccgcctcagcctcccacaaattttcttctttatacttctttatattttccacgttttcacagtgagcatgtttctttggaactggagcaaaagttgttttttttattaatggagattctgtcaacttttttctttttgctctaaggctcttctgtctggtagattgtttcatctgaatatgtcttaacactcagtctgaatatattgggttttttttctcttttaagtactgacttagaagtaatatgcttcattgattttgtgagctcatctttttcatgtaatgttcaggacaagccagacacatttgttgcaagacggattttgttactttgaaaaccaataacagataataagataaaatcaccaattaaccaaactttttctaaacccatcacttccctgttgaaagcaattttcagctcttcctgagattcatgtatttaagtcagctctgaatcttctataagaagaaatcaatattcttctctctctctctcttattttatataattagaattgtaccactaaaggactattaaatgtgcaattgagaatctaatacttaaaacaagtctacaaagttaattcaaagcaaaggaaaatggatagagtagatagaataagtttttcctactttcttctctaattgtaactttttttaaatatgctttaagttttagggtacatgtgcacaacatgcaggtttgttacatatgtatatatgtgccatgttggtgtgctgcacccattatctcgtcatttaacattaggtatatctcctaatgctatccctccctccttccccctccccacaacaggccccgatgtgtgatgttccctttcctgtgtccatgtgttttcattgttcaattcccacctatgagtgagaacgtgcggtgtttggttttctgtccttgggatagtttgctgagaatgatggtttccagcttcatccatgtccctaaaaagaacatgaactcatcattttttatggctgcatagtattccatggtgtatatatgccacattttcttaatctggtctatcattgttggacatttggcttggttccaagtctttgctattgtgaatagtgccacaataaacatacgtgtacatgtgtctttatagcagcatgatttataatcctctgggtatatacccaggaatgggatggctgggtcaaatggtatttctagttctagatccctgaggaatcgccacactaacttccacaatggttgaactagtttacagtcccaccaacagtgtaaaagtgttcctatttctccacatcctctccagcacctgttgtttcctgactttttaatgattgccattctaactggtatgagatggtatctcattgtggttttgatttgcatttctctgatggccagtgatgatgagcattttttcatgtgtctgttggctgcataaatgtcttcttttgagaagtgtctgttcatatactttgcccactttttgatggggttgtttctttttttcttgtaaatttgtttgagttcattgtagattctggatattagccctttgtcagatgagtagattgcaaaaattttctcccattctgcaggttgcctgttcactctgatggtagtttcttttgctgtgcagaagctctttagtttagttagatcccatttgtcaattttgtcttttattgccattgcttttggtgttttagacatgaagtccttgcccatgcctatgtcctgaatggtattgcctaggttttcttctagggtttttatggttttaggtctttaatccatcttgaattaattttcgtataaggtgtaaggaaggcatccagtttcagttttctccatatgggtagccagttttcccagcaccatttattaaatagrgaatcctttccccatttcttgtttttgtcaggtttgtcaaagatcagatagttgtagctaagcagcattatttctgagggctctgttctgttccactggtctatatctctgttttggtaccagtaccatgctgttttggttactgtagccttgtagtatagtttgaagtcaggtagtgtgatgcctccagctttgttcttttggcttaggattgacttggcaatgtgggctcttttttggttccatatgaactttaaaagtagttttttccaattctgtgaagaaagtttggttccatatgaacttaaaagtagttttttccaattctgtgaagaaagttattggtagcttgatggggatggccttgaatctatgaattaccttgggcagtatggccattttcacgatattgattcttcctatccatgagtatggaatgttcttccatttgttagtgtcctcttttatttcactgagcagtggtttgtagtgctccttgaaaaggtccttcacatcccttgtaagttggattgctaggtatttaattctctttgtagcaattgtgaatgggagttcactcatgatttggctctctgtctgttattggtgtataagaatacttgtaatttttgcacgttgattttgtatcctgagattttgctgaagttgcttatcagcttaaggagattttgggctcagacaatggggttttctagatacacaatcatgtcatctgcaaacagggacaatttgacttcttctttycctaactgaataccctttatttccttctcctgtctgattaccctggccagaacttccaacactattttgaatatgagtggtgagagagggcatccctgtcttgtgccagttttcaaagggaatgcttccagtttttgcccattcagtatgatattggctgtgggtttgtcatagatagctcttattattttgagatacgtcccatcaatacctaatttattgagagtttttagcatgaagggctgttgaattttgtcaaaggccttttctgcatctattgagataatcatgtggtttttgtcattggttctgtttatatgctggattacgtttattgatttgcatatgttgaaccrgccttgcatcccagggatgaagcccacttggtcatggtggataagctttttgatgtactgctggattcggtttgccagtattttattgaggatttttgcatcaatgttcatcagggatattggtctaaaattctgtttttttgttgtgtctctgccaggctttggtatcaggatgatgctggtctcataaaatgagttagggaggattccctcttttcctattgattggaatagtttcagaagaaatggtaccagctcctccttgtacctctggtagaatttggctgtgaatccatctggtcctggactttttttggttggtaacctattaattattgcctcaatttcagagcctgttattggtctattcagagatttaacttcttcctggtttagtcttgggagggtgtatgtgtggaggaatttatccatttcttctagattttctagtttatttgcatagaggtgtttatagtattctctgatggtagtttgtatttctgtgggatcggtgtgatatcccctttatcattttttattgcgtctatttgattcttctctcttttcttttttattagtcttgctagcagtctatcaattttgttgatcttttcaaaaaaccagctcctggattcattgattttttgaagggttttttgtgtctctatttccttcagttctgctctgatcttagctatttcttgccttctgctagcttttgaatgtgttcgctcttgtttctctagttcttttaattgtgatgttagtgtgtcaattttagatctttcctgctttctcttgtgggcatttagtgctatatatttccctctacacactgctttaaatgtgtcccagagattctggtatgttgtgtctttgttctcattggtttcaaggaacatctttatttctgccttcatttcattatgtacccagtagtcattcaggagcaggttgttcagtttccatgtagttgagtggttttgagtgagtttcttaatcctgagttctagtttgattgcaccgtggtctgagagacagtttgttataatttctgttcttttacatttgctgaggagagctttacttccaactatgtggtcaattttggaataggtgtggtgtggtgctgaaaagaatgtatattctgttgatttggggtggagagttttgtagatgtctattaggtccgcttsgtgcagagctgagttcagttcctggatatccttgttaaccttctgtctcatcgatctgtctaatgttgacagtggggtgttaaagtctcccattattattgtgtgggagtctaagtctctttgttggtctctaaggacttgctttatgaatctgggtgctcctgtattgggtgcacatgtatttaggatagttagctcttcttgctgaattgatccctttaccattatgtaatggccttctttgtctcctttgatctttgttggtctaaagtctgttttatcagagactaggattgcaacccctgcctttttttgttttccatttgcttggtagatcttcctccatccctttattttgagcctatgtgtgtctctgcacatgagatgggtttcctgaatacagcacactgatgggtcttgactctttatccaatttgccagtctgtgtcttttaattggagcatttagcccatttacatttaaggttaatattgttatgtgtgaatttgatcctgtcattatgatgttagctggttattttgctcgttacttgatgcggtttcttcctagccgtgatggtctttacaatttggcatgtttttgcggtggctggtaccggttgttcctttacatgtttagtgcttccttcaggagctcttttagggtaggcctggtggtgacaaaatctcttagcatttgcttatctgtattttatttctccttcacttatgaagcttagtttggctggatatgaaattctgggttgaaaattcttttctttaaaaatgttgaatattggcccccactcccttctggcttgtagagtttctgccgagagatcagctgtttgtctgatgggtttccctttgtgggtaacccgacctttctctctggctgcccttaacattttttccttcatttcaactttggtgaatctgaccattatgtgtcttggagttgctcttctcgaggagtatctttgtggcattctctgtatttcctgaatctgaatgttggcctgccttgctagattggggaagttctgctggataatatcctgcagagtgttttccagcttggttccattctccccatcactttcaggtacaccagtcagatgtagatttggtcttttcacatagtcccatatttcttggaggctttgttcatttctttttattcttttttctctgaaattctcttctcgcttgatttcattcatttgatcttccatcactgattccctttcttccagttgatcaaatcagctactgaggcttgtgcattcatcacgtagttctcgtgccatagttttcagctggacttctgtgcattggttattctagttagctattcgtctaatcttttttcaaggtttttaacttctttgccctgggtttgaacttcctcctttagctcagagtagtttgattgtctgaagccttcttctctcaactcgtcaaagtcattctccatccagctttgttccgttgctggtgaggagctgcattcctttggaggaggagaggcactctgaattttagaattttcagttttgttgttctgtttttttcccatctttgtgtttttatctacctttggtctttgatgatgtgacgtacagatggggttttgatgtggatgtcctttctgtttgttagttttccttctaagagtcaggaccctcagctgcaggtctgttggagtttgctggaggtccactctggaccctgtttgcctgggtatcagcaccagaggctgcagaacagtggatattggtgaacagcaaatgttgctgcctgatctttcctctggaagttttgtctcagaggagtacccggccgtgtgaggtgtcagtctgcccctactatggggatgcctcccagttaggctactcgggggtcagggacccacttgaggaggcagtctgtctgttctcagatctccagctgcgtgctgggagaaccactactctcttcaaagctgttagacagggacatttaagtccgcagaggtttcttctgccttttgtttgccctgcccccagaggtggagtgtacacaggcaggcaggcctccttgagctgcagtggactccacccagttcgagcttcccggctgctttgtttacctactcaagcctcagcaatggcgggcgcccctcccccagcctcgctgccgccttgcagtttgatctcagactgctgtgctagcaatgagcgaggctctgtgggcgtaggaccctccgagccaggcgtgggatacaatctcctggtgtgccatttgctcagttggaaatgcagaaatcattcatcttctgtgtcactcacactgggagctgtagactggagctgttcctattcggctgtcttggctccacccccctctaattttagctttaagtaacttacaaaaaaacagtattaccatatatattggaaaaaaatctgaacaggccaaaaaaagctgaaccaggtttttgagcatgagaagattgagattttgttgccttgaattttttggatatcgttttgatctttttttttttgagacggtgtcttgctctgttgcccaggttggaatgcagtggtgccatctcagctcattgcaacctccgcctcctgggttcaagtgattcttgtgcctcagtctcccgagtagctgggattacaggtgcccaccacccacctggctactttttgtatttttagtagagacgggatttcaccacgttggcaaggctggtctccaactcctgacatcagttgatccaccctcctcgcctcccaaagtgctgggattgcaggtgtgagccaccatgcctggctcattttgatctattttcaaaagtactgttatatgtgcattacaaaaaagttgagcaaaacagaactgtgtaagttatacactattatttgtttggtgttcactggacagatatgcaacatatacctatatttacaaaattattttttacctcaataggataatattccattgttctcaacttgcttttttgtcctaaattttttgtgaaataaattcagtttcagtacatatacatttacctcacttggtctatatttttgcaagagtttctgttggataatatcctagaagtaagatttctagtacaaagaatacacgtttaaaattttgttttgsctctcaagaaagcttgtgcccatttcaccacccctcacatggaatgagaatgaaagataaagtttctgaaacataggtacatggagattctgcygggttttgataagatataatttaaaatcatgatcagaaggttgctcagctggcttggggaggagatgccttctaaagtcagaatcctgtaaggtattcctgcctaactcttcaactccattctctacccagaagagaaaaaaggtgtgtgtgtgtgtgtgtgtgtgtgtgtgtgtagaaatatgtctcctctgcaaaggatccctcaaaatgctgagtgtaacagagggcagatttttggagtcagagctgcaattaaatttcagccctgtctctcaatagcagcttgtctttaagcaaaatgtttaacatttctgacctgttttttatcgtctatagcaaggggataatcacaccaccttacagggttcactgtgagaattaaatgtgttacttaacacaaaaggctaataaatggtgaggactaagagctcaattaatggcttccattgagacatgagaaagggtgattatgaccaagctacgggcaccttggagggtaaagttttgcccacttttgcagaaaaatatgagacaatcactaacagtctagttaagatatgctatgtgggccaggcatggtggctcacacctgtaatcctagcactttgggaggcaaaggcaggtggatcacctgagggcaggagttcaagaccagcctggccaacatggcgaaaccctgtgtctactaaaaaatacaaatattagctgggcatggtgacacacgcctgtaatcccagctacttgggaggctgaggccggagaatcgcttgaacccgggaggcggcggttcgtgccactgcactccagcctggatgacatagcaagacttcatctcaaaaaaaaaaggtatgctatgtaacactacacctttcccacctacatccaggaaccctctttgattttaaccataacaattttatcaccttctcatatgcatcattactcatttactatgcttattgtttatgtcctttcctagggtgttccatatgaacaaaactttattcttgttcactaaatttcaacatcagggtagctgaaaacaaagcctggcacatagtaggcactctttttttttaattttattattattatactttaagttttaggggtacatgtgcacaacgtgcaggtttgttacatatgtatacatgtgccatgttggtgtgctgcacccattaacttgtcatttagcattaggtgtatctcctaatgctatccctcccccctccccccaccccacaacagtccccggtgtgttctcattgttcagttcccacctatgagtgagaacatgtggtgtttggttttttgtccttgcgatagtttgctgagaatgatggtttccagcttcatccatgtccctaatcctgtagctgggattacaggcacccactgccgtgcctggctaattttttgtatttttagtagagacagggtttcatcatgtttgccaggctggctttgaactcctggcctcaagtgatccgccagcctcggcctcccaaagtgctggaattacaagagtgagccactgcgcccgacctagaatgactattaactgaagaatatgggactgagagcaaacaatgaggtggataattttattcaccagaaactttctaaaaagagaagagccacagtgtccagtgggttttatgaactttgcttcatggatcatgaggaaggaccaggggtcctagagctactcggttttaaatccatcttccagtggcccatgttgttagagagcaaggcccagaggtgagttacagctgagcactagggcaatgtgtcctatgaagaggaaagaggacataatagggagagctcagcaaggatgagggaaagtgggaagtgtttttaacagctgctaaaagtatggaacttagaagacaaagaattatgccccaagaagacttctgggatgttttttgtggtacacaatatgaaatccctgggtattccagctttaaggaaacctacatgaaaggttgacattgtttcaaagcttctagcattcaatttgtgttcctttgagtgtgatgtcatgcttatactgagatacatgcttatrctgggaccgccagatttattagggttacactgaccaggtttctttttattctttaatttatttgggcctctcttattgctgtttcccaccagtcactagacttgttattcattgtaacagcatgtgattcatatctcaaatgtattgcagtttcccatatgacatcttatcttacattatttgcatattgtattacattatctcttctcttatatattagagaagtgactggagttatttttatttcctctgcagagtgctatagttcgagatcatgtcttagagttggttacttctgagaagagttcttatatttggctaattccactgtacatatattatcagtatctagaaatttcrgttggcctctttcatcaagccacattctgattcaattttcaggaaacttagkcagtttctaaactattcagaaagctggagggggaggccatctagggtagatttaagcatcaacctgattttaatttttttttaatatgagcttagatagaaccaaatataatttaatagtctcyattttttgttacagaagatttttggtaatttggtccaaaagatgtattaaaatgcttagagtcaaccaggaccaacctggtttccatttttctgtcccatgtcctcattggtttagtaatttggccagagagcatggcctgattttttgatcagaagatatagtcaccatactcatggaggaaggaatcagggactgtgggttacctggtatagaaggacatagtgaaggaaaagatagagaggtttggagtttaaaggataagggatgtcgtttttgttagtttttaaggaaaaaggaaactgaacatttgggtatgcaaagaagtcagtagaaagtgagggattaaaggtggagataaccactgaagcaagttctggaggagacaaaggtagatttaatcacaaacctgggtgggccttggagaggaggaaacacatgccattctcagggaagcagaagatggaagaaatataaggtatctgaattgaaggagtttctgacatgacctacactgtctcagcatagttaagaaacagtcgaatgactgtgaggaaagcaaacgcaggtttgggaatgtgagaagaatagaaaagaggatagtgagttgtttaggaaaaaataaataagtttgtgtcaactttgagtcaccctgagggcctagctgaagttagataataggaattagcacccgccccatcactaagtagcataattgtcagtgtcatcatacagcagcccagaagccaaggaatggatggtttgagtctgcccagcactggggattgggacatgcctgtgatggaaagtcaagctgtcttcttagggaatctctggctggtgagtgccatctaaaatgcttatcgtagcaccagacgaaggccaaggaactagaagtttgctgaggacagagaaattttgttagacagaataaaagggaagaaagaagtcaaattcagggatgatgacttcagagtttaataatacagacatgaagcagtttggagtgataattccaaagttttctgcaatggagatttagaaaagagtcagagaatactgaggtctgaatgtgaaggaagtcatccttacgaactttgctgttacccagtgtccaggctggatgacaggtatttccaggaagagaatgagtgacatgaatatgtgacatttccccaactcaggtgaccacaaaactgtttttcttgtaaatgccagtattccagagatcattctttggaaaactctgttctagggctcatcagagactttccgtttgttgaatgaatgaattacaggtaagaagttaagaggcagcctgggacagtgtcaaaataaagagaaggcaagtatgtggctctaattacagaaatcattttgagcctaggcatcccctactctggtacttccatctcatgaactgccaccttctctcctgcatccctctgtcaccttcttgctaccagttgtgggccaggcagttaagatttatttatttagatacatctccttattacctattcctttcttatgtttgtagatggttctgttcttgcaaactcccaaatagatatcagtgaaatcaaagccactctttgagggtgacaggttggcagagaataccatgacattttgaaaccttttgtccagagagtccttgggtccccaggtgtcctgcctatttacacataatatgcatatacatattcttcaccacacagccttctttcctcttccatttaagttggctatgcttatacctaccctcatttcatgtcattctgatggtagttagcaaaggaggataaggaagcaaatggtattttacaaagtatcatagtaaactggttggggaattatgtgctagattaatgctgctgctgaaaatggaaaaccaaccctaccaccaccaccaccgccactccacccccacctcattaggtgactagaagacaaataggacagatatcagaaaggtctttgtaaaaagaaaaatagtacagaactcttcactaagcagaggatttggttaaagaacatacaagatttggaatggctctcaagtaaatatctgttgcaggggacaccagatttgatgtaaccacgacttctgttgctttgttttagaacgccagccaggcccctctgtggccaattccaatgccctcccttcaagttcagctgggatcagcaaggagctgatcgatctgcagcctctcatccagttcccagaggaagtcgccagcatcctgatggagcaagagcagactatttacckcagggtcttgccagtcgactacctttgcttcttaacacgggacttgggcactcctgaatgccagagctccttgccctgcctcaaagcatccatctcagcgtcgattcttaccactcagaatggagagcacaatgcccttgaagatctggtgatgaggtttaatgaggtaagaagccactttttgatgtcttggtatttgactcacccgtaagtgattttcaagcatacctccccttctaggtttgtctgttcctgatgtgttcatttcattctgtcttgccacttccatgatggctgtttttctttccaggcaaagagacagacatcacattgcaatccttcctctcactgtaccccaacttgcccttaagcctaattgatctcaactccattctattgcattacccagtccaccaatcctagtccctttgggcacccagaatgccaatctccaaccccttcctctcccctaccaacccctcattcccaaaggtgcttttaaaaccacatgtctcaattttgagttttgacagcatgatccctgaccacattcgtataaccaaccccctgacccccttccattattaggactccctcagcagaaacacctaggtcaccagagaaggcaggaaacgtggggcaattcattgaggggcagtgaatcacctcggttctctctctgcatcccctgaagatcctcagccccagaatatcaatccaaagcctctgagaccacattagaagccagttctgaagaagacaggtgtgactggagtctgggaatacttaggacaaagccattgcgtgggggtctagggactcactgggagatcaagagccactggctgacatccctgtggccctgggatagggaggagcgtcaggaaagagcagggagtctccatgcagtactggggttgggcggactgcactcttgggcttaaaaggcactttctcttagtaatgtaacccacacccagagttttctattctacattttatgttttagatttaatttcttttgttttgtgtattcaatcacaaaattttaattggtatgtttgttggttgttagttggctgaacacagagtagttgcctattttggtcatttagtaaactctacctaaatgctaacaggatattcctattctgagtcatatatatctctgattgtctgaggatctgtcatcctgtgttacataaacactttctggcaaggtgcggtggctcatgcctgtaatcccagtgctttaggagggtgagacaggaggatcgcttgaggccaggagttcaagaccagactgggcaaaatagcaagaccttgtcagtacaaatttaaaaattagctgggcatggtggtgcacacctgcagtcccagctactgtggaggctgagaccctctaaggatcccttagcccagaagtttagaggcttcagtgagctaggatcacgtcattatactccagcctgggtgacagagtgagacaccatctttagaaaaaaacacaaaacactttctaactgtagctcactttgcagcctccatagcttgccaatcaaaatcctgatgatggttgtaaatgtcagtgaccatgataaggcccatgaatacaacgagtgttagaggctgagctcaagcggttctgtatccagacatgtcctgaacaccagtctatctggcactgttgtgctaaccattttatatgtaccacttacttgctccttacaacaaccttgggagacagatattgtcattagccctatcttatcaatgagaaactgaagtatgtggagatgaagttattttcccaagattacacaagtggtaggtggcaattttggtttaagcccacaaagtcaggccctgggctttgaataactataggatgctgcttcccacctgcagcaggattgcactggggggtggtgcctgctaaaactgcagattcctggtcccacccccaaactgagtaagacagaatctctgggagtccacatgagagcttgcaaatgtcactgccccaaagttgtttttaaaaataaaactcctgatgttcttgattttccttactgataaaaatgggatggaaaaatgaaagttccagtaaactgagtgattttattagtggatttcactgtatttcatgaattattttaaacttccagatctacccactctcacatccttaggaccctatcttgtctttatttttaaatttcgacctgaacttaaaagtgaattgccaaaacttttaaaatctaattttaaaytaaacttggatttcttccattcacttccataaccttgggaatcaaagacgaatcagtgatttcactaattcagagttagagatgatatgacctacagctgggtagaggcaggctttggactatctctgaaaatagtttagctaagcaacttcagaacgtaaacaagatttctgggaaaacacttaaactacttaagagaacagtctgtttcaagtattctcaagcatctattttcatacaaattatgggtatgctgattaaaaatcagtcttacatagtcagatcccaaatgatctctactggacacgactggaatagctaaattctagttcttttgtataccttaaagtagaaaagttccattacatcaaaagagaattttcaaattcagatttttcacctattttgagtgaccttgccttgaaattagcatggctttayatactgtaaagaaaaggaagaaatggagtttgcatttatttaatagatgctctggactggacattttcacatttcttaaaatctcattcagttcttatgacagttgtcatcaaccctgtcttgcagatgaggaaagtgaagcttaggcaacaaaataaataatgacagtgttggattatggcccatagagtaaaataaatattttttaatccataccgatataaatacatcagtgtggtggggttggggagtagggacagcacttacttatagaaaaatttcaattaataaatgtagaaagaatgagaaaaatagaaaatcatcattagaatactacagtaataactgttgcaggcaagaactactgatgaattctaaaattattgggcaaaagtaagtttgatgagaaataggacatttgcaaatagtctcaaagcatctctccacaaggtatttattaatacaaaggggaaaatagaacagtggagaaacccggtagacactggcttgaccaagtgatcaaggctaacatgattagtaatgagacatatcaacatatgcctcctgatatgatgccctgagaaaggcaggacttcatctctatagtgttcttgccaaaaacacaccacataaatctagcaatgaaaaaaaatatcaggcaactctaaattgaaggacattctactcttcaaaagcatcaaggtcataaaaggtaagaaaaaattgaggaactgttaaaggctagaggagaccaggagacatgacgactaaatgcagtgtgggatcctagtggaccatggactagaaaaagacattaatggaaaaactggagaaactctgaggctcatagtttagttagtatgattgtatcaatgttaatttcctggttttgacaattgtgctatgattatgaaagatgctaacattagaggaagctgagtgaagggtgtacaagaactctcygtactgtcttttgcaacttttctgtaaatctaaaattacttcaaaataaaaaaaaattgtaagcagtgagctcagagagattgagtcacttgtctaagtagctgagtggatatcagaatccagatctttcttcaaagtctatctcttctcacccagctgcttctctcttgttaaattatcaggttcaagtctgtagtaaaacctgacttgctaattgagaatttcattagccttgggtctcctttccctcttccctccctctctttctatttcttttcaaaatctcctgtgtgtctatcttttttctacttctctttctgatttttatccagtttcccattatctaggttcctgccattactccytcattcattcattcattcactcaagagatttatttatttcaattttttagttttaatttttgtgggtacatagtaggtgtatatatttatgggatagagaggatattttggtacaggcatacaatgtgttattacatcagagtaaatagggtatccatcatctcaagtactgatccgttgtattaaaaacaatccaattacactccttttgttacttttaaatgtacaattaaattattattgactatatcactcttttgtgctatcaaatactagatcttacatttttttctgactattgtatgtacccattaactgtccccacttcctccctcactcccctctactacctttctcaccctgtagtaaccatccttctactttctgtctccatgagttcaattgttttaatttttagctcccacaaataagtgagaacacacagaggttatctttctgtgccttgcttatttcacttaacataatgaccttcaattcaattcatgttgttgcaaattacaagatcttattcttttttatggctgaattatatatatgtgctacattttcttatctattcatcttgttgatggacacttaggttgcttccaaatcttggctattgtgaatagtgctgaaataaacatgggagtgcagatatctcttcaatagattggttttctttctttggggtatatacctagaagtggggttgcgagatcactgaagacatacttattggctgggcatagcagctcatacctataatcctagcaatttgggagcctgaggcaggcagatggcctgagcccaggagtttgagaccagcctggggaacatagcaaaacctcatctccacaaaaagtacaaaaaattagccaggcatggtggtgcatgcctgtggtctcagctacttgggaggctgaggtgggaggattgcctgatcctgggaggtcgaggctgcagtgagccaagatcgtactactgcacttcagcctgagcaacagagtaagtccctgtctcaaaaaacagacacattgagcacctactgttctctcgtcttctctttttttccattggcatgtcaaacatattttttaaaaataagaaattagcagtatatggtgaaaattgatgttataagcccatactttgattctgccaaaattggatacacaaaataaatgcactttcctcagtggaaagatgtatattccttggaatgttatagtatcttaaagacaagaaagagaatattagctccattgccggtgctagtcacttggggtggggggaagtgaatgcatttactcgtgcatccattcagttaatccaggacttcttagaagcagtgtactgtggtagatatgcactaaggaaagtaaatagcagtctgccagaagctatgagacatggacacaaatatctaccaaaaaaggcagaaagtaagtgcagtgagagtggcaccaacagagaaggctggggtgtccaggtgggtgacaagagctcattctgctgagccctcgagtctggggctgggtcttgagagatgggaggaatagagggggaagttcatggaaatggaaggcagtccagacaagaagacaatcagacagtttttgtcatgagcaagactcatggtttagggaggcagcttgttccagattgcccccagaaccacgcttatgagctagaagtttctatattctaacaactctctacacaatgacttaactgtaatgtgagaaaaaggaagaarattcctaatactttttgggcagttttgcataatgtttattcttaggaaagcatggttaaaatgcaactcaaagtacgaccatgaaattactgaaaaggttcagcttacattaatgaaggcctggagataaatcatttaaaatcagtttggattgtggcttggaagcagtgtttcctccccattcccccttctcatgccctattagactgtgatgcacacactagagaaacttcttaaaggcagtctctctttatccttgaaaagaaacagaagcacaaggaggggtcagtcctcaggcagagctagtcaagatttgtgttgaacgtaggcttcatcctgctttgcttagtttgagagacaggtcttcccgaactttcttaatctggacacctctctgtagtcatattcctgatctgaagctcttagaagccagtgttctttctctctcctttcaggtggagcagcctcacttcttgaccacccacgaaatctctcactttgacagtctcaaatcatattgttcttttttcctatccttcatcttcctgcatctagcttatacctctagcccacattccttatgaccttacttttaaaaaattcctcctaaaataaattcccaagccctttatcttttctagaggaaatgcagaggcatttttatagacaattttaccaaaaagattacatactttagtgcatgcaggtgaaaagagaggagaggcaaatcgagattgcagggcatccttcctcccttcactacctctcccctctttcctgagaagcactttggtggaacgtggagtgagggggaggatcttggcatcacagttctgagttgctagttctcaaacttcatgtctccttaatatgtcctttgctcttgttgtgttgttcaccaatgatgattttgggggttggaacccttcattgcatctatagctggtccttgggatcgatcacacaagcaaatttttgacttcataacctgtcaccacccacaccacttccaggcactcttttgtgtaacagacagttgatatctctggctrgaaagtgattttcaaggggccataagcaggttcacttttttctatgtcctaagagggcagtttttgcttgttgggtggttcttggcaacaccattcagcagggcttctctttcagaccagctggtctgagggtaggtcatgagtcctagattgagacccccagttctattgagaccccagcagcttctacaaggcctccatgtggctctgccctgggtgtcttttcccctccccaattctgtgtggtcaacctgagcattcatcagctagcttccctgagccatgcaatcttgggcagcccaaagtgacaatcagttgttgcttgttccttctgtccagtaggtttcaccagatgtcagttcaacagtttaaaggccatcctctctgtaaagaatgccaagatgcagcttaacttcctggtaaagagtagtaagaataaataaaccatctggtcaaagaagagccgtttgagctttcagccagaattccttatatacttcatagcaatgatgatcgctttggcagattccagcatctaaaagcctgtctggtcatagctatggaaagaccatttcagcacagtaagcagaaagcatagcatattataaygatgtgaggcagtgtcatgtccaaataggttctttcacttgaaatgttttagaaaaaatattggtttttgaatttgtatattgaaccatgtttagaaacgtctcaatcaaagttttccccctcttttataaaagcagacagcagagcaaatcatctgttcagggctgctttacaaacttccttcctcaaatctgaacactcacaggataaactgctgataaaaaccccctcagggtaagggaaatttcagctcactttggaaaatcaaatttttccttgacaaagcacatctcccctctcagagcagataytgtattctttccctggaacatttcacagcacattccaggagtaacagatattttactccagaaatttcttgactaaaaaaaatacagtaggcaaataaactacagaaactcagctgtgcagggcggcatcctaagtgcaaggttagctgtagatggcacttccatcctgaagctgattgacagcaaatcatgtctcatggttcctggcagtcagcacccacacagggctttcctcacccagagtaacacgtagggctgagaaataagaggggcatggaggcttgacatcattcaggtgcagctctggagtcaggctgcctgggttctgatccaccattcccagctgtgcaacctcaagccagatacctaacccttcatctttatcttatttttattttagtttagttttttttttttttttttttgagacagggtctctgttgcccaggctggagtacagtggctgatctttgctcagtgcagcctcagcctctcaggctcaagcgatcctcccacctcagcctcccaaatagttgggactacaggtgcacaccacctcgcctggctaatttttgtatttttagtagagatgggatttcactgtgttgtccaggctggcctcaaactcctgagctccagagatccacctgccttggcctcccaatgtgctgggatttcagacgtacgtcaccacacccggcctaatctctcatctttaaatggggctaataatatatctaccccaaatgctttatatgagtattcagagaaatgacatgtttaargcacttatcagggaccaaagacacagtagtggtttgatgttagttcccmaaaaaaaaaaaaaccactaacataacagcattattagaataactaatgataataaattccgttttttattattatgatcacccccacttaacaggtgagaaaactgagacacagagagactaaatgaatgacctgtggtttcagagstgacagttgaacccagttgttctggcttccagagccagcattcttggctcatctgcttgatacttttgaatcaaaagctgagggaccttctttccaccactcggttctcttactctaaatgaaaccattttcctcgcaataggattcagaatttttttatgatttcaatatgtgtaaaaatgttgacctgtttgttgattttaacctatgtgctgacttcctgatattgtaaatgcagcatctcctttgaactaggagattgtggcccttgaaatagggaggacaacagcatctcaatgtctgagaatattagagcatgggggataatttatcatttccacagcaccaggcagaaggcagatttcagatttttggcttttcaagttcccttcttggctctgaggtttcctttggtgtgaaatgcctgagaaagattgcccccaaaatctaaaggagtttatttatattcctctcttgaccacatcatttctactacatttttccacctctctgtctgttcattcctattttacatgaaacccacacccttagcggtgatggtgctatgatttgaatgtgtttactccaaaactcaggtgttgccactgtggtgggattaagagttgggacctctaagaggtgattaggctgtgagggctcctccatcgtcaatgggattaaggcccttgtaaaagagacttcatgcagcattcagcttacttgccctttcaccttctgccatgtgaggacacagtgtccccttcagaggatgcagctgtcaccagacaactgaaattgttagcaccttgtggagctcccaggctcagaactatgagaaaataaatttccactctttatacattacacagtggtattctcttatagcagcacaaaatggactaagacagatagctttgaaattcaaaatcttaagtcctacctgtgctcccagttggggcagcaggaggaggcagtgggaaggggctgccttgcaccttgtcagacaggactggcacgcatgcactcattcttcaaccatctaatgtgacttccttgaacagtagttctcactgatcagcggaatgaagacaatgggaatcagaatatttttaaaatgtgcacgtatccgtagcccacccccaagagattctgcctccgtggatgcaaggtggggcccaggcatttataattttgaaaagctccatgggccgggtgcggtggctcacgcctgtaatcccagcactttgggaggccaacatgggtggatcacaaggtcaggagatcgagaccatcctggccaaaatggtgaaaccccgtctctactaaaaaatacaaaaaaaaattagccgggcgtggtggcaggcgcctgtagtcccagctactcgggaggctgaggcaggagaatggcgtgaacccaggaggcggagcttgcagtgagccgagatcacaccactgcactccagcctgggtgacagagcaagactctgtctcaaaaaaataaaataaaataaaataaaataaaaagataaaaagctccatgaaggccaggcatagtggctcactcctacaatcctagtagtttaggcatctgaggcaggagggttgcttgagtccaggagttcaagacaaaccagaagttcaagaccaacatagcaagatcctgtatctacaaaaaattaaaaaattgacagggcatggtggtgcatacctgtagttccagctactggggaggctgaggtgggaggaacatttgggcccaggaattgaggctgcagtgaggtaggatcatgccactatactccagtctgaatgatagagtgagaccctttctctaaaatttaaaataacaaaaaggaaaaaacataacttcacgagataacgctgatgctaccaacacaccaatagttgagaatcactgctctagaacatcagtcacagcagtactcaaagagaacaaagctgtatcccaaagcaaataggaggaaaatgtcttccttccttttctttctgttttttttttttttcattttttgctcatagtactgccatggaggacttcattttgaaacaggaggaaaatggtttctatctttggggtcatccattagtgcagatacttgagaattgttccaygtacatttaaataaatgtaatgggttgttttccctgccttcatttcttttttattttattttattttttgagacagagtctgactgtcacccaggctggagtgcaatggtatgatctcggctcactacaacctccgcctcccaggttcaagcaattctcgtgcctcagcctcccgagtagctggatcacagatgtgcaccaccacccttggataatttttttttttttttttagtaragatggggtttcaccatgttggccaggctggcctcaaactcctggccttaagcaatccacctgccttggcctcccaaagtgctgggattataagcctgagctaccatgcctggccccatcttcatttcttttctttcttctttccttcattccttccttttcttctttcctttctttctgtatttttttcattgtttgctcatagtactacaaaatggaggatgtgattttgaaacctttaatatttagactattttattactataataggctatcttaattcttagttctccttcttaaagctcacattgtgtctctagaatttaactggcccagaaagttaactgtcaaagccattgacttattggagacatgtttaattctgttttaaagcaggtatcagttaacacctctgtcctgagactggtagaaacaataatggatscggtggaaatcagcaaatagatgaataggaattttgacctatgtgagcagtgttattactattaaaaataataaacatgacccagagaagcactgcagcagttcctcaaggcctttgccatcagatcacttaaatgactctgaacactgtgggaaagatcaggtcagctttggtcagagattaggattttgagcctcttttcaggacggcattagctgaccctattaggatgtttaattctgctctttgaaaaaccacttttagagatttttactgcacatgtgagagccaaggaggaatgtatttatgctttactgaggatctgcatttgcccaaaagatttaaacattcataaatccaactgccttctcaatgcctcaccttggctttttttgttcaacaagatttcagtaccaacttttgtactaaatgctgttttgtgcatggggaatatggcacagaacaacacagacaaagctcctgccccactgagcttacattctagtcatgtctaaaagacatctcaaatatggccaaaatagaattaacttctccctccacaccattcacataccatccaggaccttcccccctcacccagtgctgctgccctccccatctcacttagcagcttcagtgtcaactgaagtgttcaggccatcaaccagagtttgattgatttactctttcctcaaaccctgacatctaaactgtactaggctattcttgcattgctatagagagatacctgaggctgggtaatgtatgaagaaaagaggtttaattggctcatgcttctacaggctttacaggaaatgtggtgctggcatccacttctggtgaggcctcggagcttttactcatggcgggaggtgaaacaggaggaggcacgtcatggggcaagaatgagagcaagagagagaaaagggggatgtcccagactcttaaaacaaccagatcttgagtgaactaaatgagtgagaacttactcatcaccaaggggatggcactaagctattcataagggatccaccccatgatccagcacctcccacgaggccccaacattggggatcacatttcaacatgagatttgaacagggcaaacatccaaaccatagcataaactatcagcaagtttcatttgcattacttgcaaaataccccctgaattggcctattccttagtatttcatctgctaagctaggttgaaaccagccatcattgcacttatctccagcactgctttcatgctgacaaatgctataatccattctccacccaacaatcggggtgatcatttataagcataaaggtaactcccctgctaagtgtcccttcaacggcccccctttgcgtttgaaataaaatccaagataacaagaccctgcatggttttgctcctgcctacttctccaacttaactttatttatttatttatttagaaatggagttttgcycttgttgcccaggctggagtgcaatggcacgacggtcagctcactgcaacctccacctcctgggttgaagtgattgtcctgcctcagccwctctagtcgctgggattacaggcacctgccaccatgcccagstaatttttgtatttttcgtagagacaggctttcactatgttggccaggctggttttgaactcctgtccttaggtgatctgcctgcctcagcctcccaaagtgctgggattataggcacgagccaccacgcccggccctccaacctaactttatacactcacccctctctctggctctgttttagccacacaacctttcattctgttccctggacatgccaagttagttttctgtacatagcctctgcagttgttgttgcctctgcaaaagaccttctttctcagaccatatcacagctactgccttcccttggtcatgtcttagctcaagagccagggaacttgacttgcttatttttttttttctatctccttaggctagaaacttttctaacttgttcattgctatatctctggtttttatgcatggtaccatctatatagtagatgtgtaatagtattttatgaataatgctaattagtgtaaataattatcctattaggtactgttagaaatacaaagaaaagcaagacatgggtcattttgttcgaggaatttacaatctagttcaaggcatacaagacataaaataatgaataaatatacacaaaaggggataaagcaatgccaggcatgaactattgtgtaagagatcatggttagagaagtgccatgagttagtagaaagaggaaagagtataattccatcattaagtttgggcatacggccacagtggctcacgcctgtaataaccagcattttaagaggctgaggtggatcacctgagatcaggagtttgagaccaccctggctaatagggtgaaaccctgtctctactaaaagtacaaaaaattagccaggcatggtagtgtgtgcctgtaatcccagctacttgggagtctgaggcaggagaatcacttgaacccaggaggcagaggttgcagtgagctgagtttgtgccactgcactctagcctgggccacaagagtgaaactccacctaaaaagaaaaaaaaatgtctgggcatgaacatggggttctgccacttactgtgggaccctgggcaagtgagtgatttaaaaaacagaatttagcttcatatttctcatctatgaagtgggataatttaattaatttcacatggttatggggacacttaaacaagataacatatataaaatcaagtacaggataggttctcaataaatggtaactagtgtgatttgtgcagaatgagagataaagactgtgcatgccatgagatttgaagagggagatcacacaggcacatctccattgaggatgaccaaaggcttcagagctttggagattgggaaggcttttgtcaggcacagctctgaactttcacactgatgaagttttggaggtaatgtggactcatgtcattcaccaaatgtaagaatcccttccttgcagcttcttgcccagcttttgctaaaaacttttgaagacggacttcgctccatttcaacaaactcattgtgaggatgcggctcgatttgttttaacagtcttccttaaaacaggcggaattctttctccttacaaattccacttgtcagtccccaggaggaatagtaaaaattatatcttcctttggtttggttctcttgaggctggacattccccatatcttcagaacttacrtcatctggcaaaaggtaaaaatggggcttcctcatctgttctgaacagtgagtctcttccttctctcaattgggtaattctccgctcttaattcctgctaaattaattgcttttctctattagctctaattattagcctggttgatgatcaactaaaactgctagacttttatcatataaacagccatcaagctcatcatttctctgcataggttgtttcatttattattttctcacatgggcayagtattttatatttaagtctactacattttaattttggggcattcaggcctatcaaaataattttgaatcttaattcagctctgtattgaattaactaacactctagattttttcatattcagatttgataaatatgtgccatgtatatttgttcaaattgttggtaaaaatgtcaaatctaataggaattaatagaaagccttatggcatgtcactagagactattcatcgggttggcctaacagaacattttttcaactggatgtgaatctccttaactctacaatcatccaacaaatgtttctccattttgtgtctcctctgtgaaacctcttcctaaaaccaagatacatarttgatatgcaagtcaaattatcttatcaaaagggaaaaaaacttaatttgacaattagctacttgaggacatctaatttctctcgcattcgttgatatgatgataatgatggagagagtgatgatgaagctgctgtgaatcctgtgccttgcactgggcactgagccaaacactttacaaccctaatctcatttagcttttacacaaccctgaaaggtgggagccatggctttattttacaaataacaaaactgagagagaggctacagataaattaagacatggggctaaaaaaatgataataattaataagtaatgaaaggctacagaatttgcccaatatcacataggttgaaagtggctaagccaagatgaaacatatatgtgtgtgtgtgtgtgtgtgtgtgtgtgtgtgtgykcgtgcacacacattactgcatctagttgcaatataaatacttgtaataggaaatatcatgaataaagaaacatgggcattaaattctggtttgttggaagggagtttaggggtaaccaagtgagggcagggcagtatctcccaacatgatatgggatgtcagtattcattccgtgtaaaaacagtgccccatcatctaacacataagccacatgctaggaaagcaatgataagtaagttgtttgtttcactgcaggacttctcatggacttatgctgaggtacatggtgactccctcagaatgagtatttcataaaaatacttgggtactggatacccgatggctcggtacccattacagagtgtgcttttggaaactgtagtagaggaggtgggtctgggccttaatgcctcagcctccccaagcagcttggccacagattcctcaagggccagggaaggagcagggaaagaatgaggactcagccgcaggtcaaagcagtacagatgctgtgggtgatgagtctggatccctcctgccctggcacatggacttacaaggtgaaatcttaatcccacgattcagattccataagcctcacgcgaacacaagtttcattccttttcatcacacctcatactttgaaagttagacagacactaaagttgtatgtaaatcattagggtggaaaacatgccggactggccctagacaaaaatccagccaagaagtttgttgacatttccagcccctacaaccccctcttcttttctccatctcactgccctggtccctaggtacgcacagctaccatggaacccacttgcccccttccctaggtactcacagctaccatgaggtcccagttcccttaaatcacatcctcccaccccccagcaccataattcatgttatagtggtcttgttataagtcattttgtaatttgtaaaatattctcctcaatgaaaagtaaaatttgtcttgtatttgtgatagttctctatttgggtcaatcaagtgtacaaatgcaacaaatattccctataagtagagagaataaaaaacctgtatatttatagtcctttaataattcctaagaagttctctgttgctgtataaaatatgttttcttaatttttagctatggaaaccaacaaccaatcttagggaaaaaatttgaagtatacttaaatttaaaccatttgtcaactaatgtgcacatttacaccacagctttacacttaagcagagcctttcacatacattatgacattaacccttacacggcctctctgtgtggctcttggactccggcctatccttctgactccacgtcctgggctcctactgtccatcactgctgactttcactcctgcagcctgcatagcttggtttggtttgttcgtttgtttgttttgttttgttttgttttgctttttagatggagcttcgctcttgttgtccaggctggagcgcaatggcacaatcttggctcactgcgacctccacctcctgggttcaaacagttctcctgccccagcctcccaagtagctgggtctacaggcatgtgccaccactcccggctaattttttgaatttaatagagatggcgtttcaccatgttggtcaggctggtctcaaactcctgacctcaggtgatccacctgccttggcctcccaaagtgccaggattacaggcatgagccaccatgcccagccctgtatagcattttgatagacattcctagagtagtttttcttaagaattgttctacagaaccctggtttctcaatatgctcagtaggagaaagtaaaaaaaaaaaaaaaaaaaaaaaaatttgtggtccagtgaatttcaaatacccttttgcagctctttccacttgtgtattgatagtcgccatgcatgttagtatactgaaggctgaagaagtccagtcataaagacacttttaactcaccagcatttctcaaatatacttaacctggaactttattttcctaatctttctccaattttccaaaacacaccactcttgaaactactaaagactatatatagacatagatatataatattaatatagtccatatttaatatatattatataatatatagtacacatacatataatatagatattaaatatatataaaggaaaaaagattcacctgtgaaatatttaaattacctggcagttgacatacattctagtatcccttccctcctctccccacaagatgaggaccccaggcaagtgagggctggacagttctaaggtggatcaaataaatgaataaaaagatatagatgccaggaagatgtctcaagtgagagacccagcttgctcaaacatattctgggcaggatcatgcatgatggactgaagacctgggtgcaggaagatccatcaggagagagttgcagtaaacaacagaagatgacaaggggcctgatttaggatgacagtgagaatataagggaaaartggctcccagatgcctagaagaaagagtcccagtaattcagtgactgttcacatagggaggctgaaggagagggaggggtcaagactgaattcaggctttccaagcgtggctttcggaataagtggagcacccatgacatcattttgggttacaaagaccagccaaagaggtcaagagcatgtgctttaattcatacactcaaaggttcaaatcctaaccctgttacttattagcagtgtatttggccaaattacttccctgagcctatttctgcaattataaaaggggactaagagtagtttcttcatagattcttgtaaaggtttagaaagaatgtatccaagccgagtgcagtggctcatgcctataatcccaatgggtggaytgcttgagctcacaagttcgagaccagcctgggcaacatggtgaaaccccatctataaaaaaatacagaagttacaggcgtggtagtgcccccctgtgatcccagctactcaggaggctgaggtgggaggatggcttgtgcccaggaggcagaggttgcagtgagccaagatggcgctactgtactccagtctggctgatagagcccaacgttgtctcaaaattaaattaattaattacgtttttttaaaaagataatgaatcctggctgggcactgtggctcatgcctgtaatttcagtgctttgggagactgaggcaaaaggattgcttcaggctagcagtttaagaccagcctgggaaaaacagcaagaccttgtctctacaaatttaaaaactaactgggcattgtggcacacgcctgtagtaccagctactggggaggctgagacaggaagatcacttgagcccagtaataagaggctgcaatgagctaggattgttccactgtactccagcctggctgccagagtgacaccctaactcaaaaaacaacaacaacaacgaaagataatgaatccttagctcaggatagtgcctggcacatagtaggtgttcaacaagtgctaattgctatctccattgtgactattatcatcatcatcgtcatcatcttgtgaagaaatatctagtttggtacatgttggttctaggatgagagtaaagtatgatctttaaatggatgcctactaggcagtgcaaggcgggagcatggagctcgtgtgctagattggtgatgcagatacagttttggaataattgttatagaagggatgagcgagccatgagaatctgtcttctaagacataaagtgggagagagatcacaggcttcaaggatcaagctttggtaacaccccctgacatggcagatcataaaaggatccagtgagaaggatcatgtgggcatcacaagagaatcaggcaagtgtgggtgatgagaaattaagggrccccagcctcatagggtgactaaaagaaaaaagaaaaaccaatggggaaaaattttaaagatgattatcatattaccctgagccagggaagctgagaagtacattaacagagcattcagaatggcacaatggcaaacattgtggaatggcataacattactctcctctccctaaagtgggcacacttgaattgacatttgcaggagaatttcactagagcagagaggaccccccctgccccaaacagaaaaaccatgttgtacaacagtagttaaagaaayttgggctggacgggcacaggsgctcatgtctgtgatcccagcactttgggaggccaaggcaggaggatcacttgtgtccaggagtttgagacgagcctgggcgacatagcgagacccggtctctacaaataataaaaaattacccaggtgtggggtacgtgcctgtagtcccagctattcagggagcctgaggtgggaggatcacttgagtgcgggaggttgagtctgcagtgagctgagttcgtgccactgcattccagcctggggaacagagtgagaccctttctcagaaaaaaaaagtgggggataaggaaaaaaagaaacttggacttcctacacaggagacttccaagatggtcaagacaggtacatttcaatattttaagggttgccataaagatgaagttgagttatttgttgtgtctttagtaggcagagctaggtccagttatttcatctcagccttagaaaaggctgcctgttgaagtagtgagtttcttataactggagaaatttcacacagagcctggctgcccagctgcaaagctgggaagaaacccctggttttagctgagaggatgacctacatcaaaccaaatccttcccatctcctgtttttgcacatcctgtgagctaataatgttttttacatttttaacaatttttaaaaatttaattgtaaattgacataattatatatatatggagtgcaaagtgatgttatgatagatgtgaacgatgaggaatgattaaatcaagctaattaacatatccgtcacctcaaatgcttatcacttttatggtgagaactttttaaagtgtattttgtttttataatttcaacttttattttaaattcagtggatgtatgtgcaggtttgtttcatgggtrtgctgtatgacacttgaggtttggggtacaaatgatcctgtcacccaggtagtgagcatagtacccaataggtagtttttcagcctttgcccacctccctctcttccccctctagtagtttccaatgtctactgttgccatctttatgtccatgtgtacccagtgtttagctcccacttttaagtgagaacatgcagtatttggttttctgttcctgcattaattcacttaggacaatagcctttagctgcatctatgttgctgcagaggacatgatttcattcttttttatggctgtgtagtattccatggtatatacgtatatccaatccaccattgatgggcacctagcttgattccatgttttcctattgtaaatagtgctgcaattaacatgcaagtgcatgtgtctttttggtagaacgatttctttttctttgggtatatacccagcaatgagattgctgggtcgaatagtagttctattttaagttctttgagaagtctctaaactacttttcacagtggctgaactaatttacattctcaccaacaatgcagtgttcccttttctccatagcctcacaagcatctcatttttaacaattttaaaaatcagtctacggccatcccatctggaacgcacccgctctcatctgatcttggaaaaactaaaaggatactattttgcgataggtgaaaattatatgaagctcaaatttcagtgtccataaatacaattttattatagcacagctatgctcatttatgtgttggctacagctgcttttgtgctacagtgtcagggctgagtagttgcaacaaagatcaaatggctcacaaaggctaaaatacttatcatctggccctttacagaaaaagtttgccaactcctgattaagatcttccaatggccttttttgaactggaaggttctgtgaggaagaaaagttttagcctgagatttggataggaggtcatggatcacttggagaccgccaacacaatagcctgcagggatgggaaactagggtgcagtggtgagaaaatgtaggtaatggattaggtaatgcctattggagaagactcacagcaaacaaaggtgaaagcctggatggtgaaagccaccatcctcagaccagcacagtatggggagatattttgggggataggatgacatgtagaagtttgtggcagaagggatatataaaagcttttcttgtgtttgatgaacacagtggtgtacttagtatctgctttattttacagcatggtttaatatatctcttgtcatatctctcagcaagaggggattttctgaatgttcttgtttatacaatgtgcagaaaatttttgcacagagagtcatgcttttgttggcaaaagaaagtgagcacttgctgattttytggcaatcctaacaaaaatactgaggtgtatttatactctgggggccaaaacgaatttcaaaatgacagtgcttagctctgtaaccatcccagctttcctcttctgcctccacggggtttaacaactttgtcaaatcccttcctctgaaatccacttctgcaagtaagttgaaacaaattcgctctactgtcatataaacaccaggcgggcttccctgctgggtgctcaatagcttggtcaccaaccaatggatgagataagcaggctaaagtcacagaaagtgtagaatgaaattgtctttttttaaagcatttttttattacattttacagtgtgatttctttattaacatctcttaacagttaaaagatgtttacttcacactgttttaaagtataatgatattcaagtgggatttcaaactagatgcagaaacttagttactgttcttattccaaacaaggcaagatgcctattagggagtcagatacaagtgactttttgttatctgtgccaatgagagaaccagatatcctgctaataaaaatccacccagaaccaaatttcttaatttgcctagtttctgccatccttttcgtggggaattacacaacaactattaacaaatggttacattcattcatttgcttttcacattcattttttgtccctatggtaatactaagagacagccctctgttcttaattttttagttgctcttcactgctgaccaagaggtgtccaggcattttaaccacattcaaggcttgtctctgcaatgtagctgtcctgttttctccccattaatcacttcatgccccttttacatctgtctacccggatgactcactgttggattgtacaggaagaggcaaagactctgcacaattccagagggcactgttcacttagtgcacaagacagtagccctgggtaagagccctggctcagatttgaattcagatccaaggctcaccacttactttcagtgtgactccaggcaagtttcctaactattgtattcttcagtctcttcatctgtaaagtggtgcttataacattgatctaatatgtagggatgttgcaagaattaaaagagaatttgaggaaatgtgtttaccaaggtgattgaccctgaatcaagcactcaataactaatgatgatgataataattctagacagctaatagcttgtaatgatttacttttagaacagataagaaaattttccttgcttccaatactatcatattttaaactccatttagaggctaccaagaagtttgggggaaacaggggccaccattttgaactccttgatgattacaaaggtggtagatagtggtgctgatattagggttggttctactgtctttatctggattcatagaatataggaactttatctaaagtaaagttttctcaacactctttrgcccagaatgttaaagaaaaaaacgttgtatccacatttaatatgatttgaaacttcaaaatagatttgctagcatgaataaaaccatttataacgctgaatatatacttcagaaacatagcatgttctcccctcctctagctaccctgctctaaccctgtccaagactgtcatcatctcctcccaagctgagagtcactgccttagagagaaagggcaatgggctggtccggatttctaatagggctcttccagttctaggagtttgtgatttggggactaagtgcctaaaccctggagagccaagccttctccaaacaagaaagaagtccctgtgtaaagagacatgagaaatgaaatagaagcagaagtttggatctaggaatgtcaccctaagaattaggggctccttttttttttaagaggaatgatatgacacaactcatgttgtaggaggataacacttcacttggtgatttcctttctctgggatgttgaaactaatagaaaaagatcatgacattcatgtaactccctgaagattttgaagacttctttcttagaaatccttaagaaagcaatacatacccacctgcttgcaatagttttaggactattagatgatgctaatcattatctctaatagttaaataactctggatatgaaatcctgacttttgggaatttctttgatatctgtactatacatctaaaaaaggtcagggaaactttgaacaggattatgagtctaggccttttgttctgtctctagccagctgtgtcatattgatcaaatcttttagcccctctgaacatcagtttctgccccataagataaagaattaggccagatgatatctaatgcttcttagaatttagactctagagtttgaactctcagagtttgaatcccagccacattgtttatatgatctacaagttactaagtctttctaagccttcctttgccagcctgtcaaatgaggataataattccttctagttagggttgttgtgatcaataaaagtcacctattgctattataatcttctgatacttaatgtataaggtgcattgtaagtaatactgaatccaaactaacctatatacactacctccttgctatacaccttcactctgggctcagrggcttgccttctatagggtgagggttacagtgagagttttgctgttgctctatcctatrtattatagcataaagtgttctcttcttcgttcctttgagataatgatttcttgtctgatccaccctcagcctggttgtcacagctgggtagtgcccccagagaagaagcagctgtagccccaggagaagctccgaggggaagagccttttaaagtggaaaaggaggatctataagctacctttcaggtgcaagacttagagagagggccaggcatggtggcttatgcctataattccagcactttgggaagccaagtcaggaggatcacttgcagccaggagttcaaaaccagcctgggctttgctgacccatctctaaaataaataaataaataaaatttaaaaataaaaaaagactttgagagagaggaccccactcaggtataatgaggtgggactcaccagcccagaacacccaatccccaccccttctagaagtgttgctagaagtagagaaagcactctactttctatacaacatatctttttggtttgcctgttgctttctgtttgatatttgtaacagctttattgagatacaatttatatactgtataatacatacatttaaagtatacaggtcagtggcttttttcatatatttacggacttgtataatcatcaccataaatcaattttaggatatgatgatcaccccaaaaagaaaccacatacccactagcagtcactccccattcctccctaactgcagctcctggaaaatagtgatctcatttctgtcccaatggatttgcctattctggatattttgtataaattgaatcacacaataagtggccttttttgtctggcrtctttcacttaagatagtgttttcaaggttcatcagcattgtagcatgaatcagtacttcatttcttttatggctgaataatatttcattatgtgcgtataccacatattgtttattggtaaaaataatgatggccatttgaattatgtatactttttggccattacaaatagtgctgctatgaaattcaagaaaaatgtwtgagcatatgtttttatttatcttgagtatgtacctaggagtggaattgctgggtcatacaactcaatgtttagcattttgaggaattgccaaactgctccaaagtgtctgcaccatttgacattcccaccaacartgtatgagggttctgatttatccacattcctatcaacacttgctagtcctacaacacatacctacagccatcctagtaggtatgaagtgatacctcatggttttgatttcattttcctaaatagctaatgatgttgagtatcttttcacctgcttatatttgtatatcttctttggataaatctctgttcaaatattttctggcaatatttctgacaatgaagcrtgacattaagatataatctcattcttggctgggtgcagtggctcacgcctgtaatcccagcactttgggaggccaaggcaagtggatcacctgaggtcaggagttcaagaccagcctggccaacctggtgaaaccccatctctactaaaaatacaaaaattagctgggcatggtggcgggagcctgtcattccagctacgtgggaggctaaggcaggagaatcacctgaacctgggaggcggaggttgcagtgagccaagattgcaccattgcactccagcctgggtgacagagcaagactctgtctcaaaaaaaaaaaaaaaaaaaaaaaaaaawtttaagaacatgaaagagctgatgatgaaacctgttggatgaactgatgaaccaccccccaccaaaaaaaaaaaagatataatctcattctttatagattggctgttgtcattctaagtctttgactatgaatgtatatgctaggtgggggaagtaagagcccacttccaagtatgaacaagaagagagggatcagcacttagggttcccactctggtctgggattatatgtataaacaggatagagagaaaatcagttttttcctgaatatgtgttcattctcaacagaagtctggactggaaggtagaagatctaggctcaattcctgcttctacttggcaaatatgaataagttgcttagtaggtaattagcttctttgaacctttcttttcatcctccccttttcagttatcttctttccttttttaaattgaactataatttacatacaatagaatttgccttttggcatgcagtttgaattttgacaatgcatacagttgcgtaatgaccaccacgatcaggatagagaatatcattacaaagggatgatactgatcycaaaagttttcatcccaaaagttccttttgcctcctttgtagtcattcctcccctatctcaaacctctgggatctgatttctctttttatccttttgcctttgacagaatgtagcagaaatagaatcttacagtaggtagtcttttgagcctggctttcttcatttagaatgatggattagaaatccctcagccaggcatggtgatgcacacctgttaatcccagcattttgggaggccaaggtgggagtatcacttgagctcaagagtgtgagaccaacctgggcaaatcctcatgtaaaacctcctgtctacaaaaaacacaaaaattatctgggcatggtggcacgcacctgtagtcccagctacttgggaggctgaggtaggaggatcgcttgagcccaggaggttgaggctgcagtgagctgaagtcacaccactacactccagcctgggtgacagtgagaccctgtctcaaaaaaacaagaaaaaagaaatccctcagtgttactgtatgtgtcaataatttgttctgagtagcatgtcattatatgaatctaccatagtttatttatccatttaccagttgaaggacatttattttcagcttttatgccattattaattggccactaaaagcattctcaaataggtgaatgtaggttttttcttgggtagatactaaattattttacgaagcgttatgcgaagtggctgtatcatttggcattcacagcaacaatgtgtgaacattccagttgctccatatccacaccagcccttgtcaaaaatctcagtttcttcatttgtaaatgggacagaagtccctaccctaccactcactcaggattgttgtaaagatagaaacagaagtgaggtggtatagcagaagtgctttgtgaaccataaagtgctatacccaagtaagaaatgctgccacttagtttgatagagatcatgctcacttcaatgcaaaacttgtttcccacatgagctagatgtttcattttttcccctacatcttggcaaaataagttataacaagtcttagacrgcaaaaaggtttgtcttagatgcattgtggagtttgttttggctccagtttttgaacttttcacagaaatgaataaatgaccragatgtaaatcattaagcgtgagtcagttttgtcaagaaaaatgaccctgtgkgatggaagtcagcaggaatggagtcagcatgacagacaatgtgacgtgctgtggaagaaataaaggcagccctaaccaggcagtgtccccagggtaaggygctgaggatgactgcacagcagcaaagagggctaatatgctccactatggtgagtctgggagagttggtgagaaaactgacaaagcactaatttcaacttttttcaaatttgaaaatcacttttttccatgttagaaacaaaaagctgtaagaaacaagccaaacgttacctcyttaacatcagaatggactaattcttagtgtgttacaaagatggttacatatagaaatatctatagatacacatatatamacaagttagtataacatacatatattcccttgctctgtcatctgagagggcatagaaacaactgacatcccagtagcaacaaggacaccttgtgctcagatcttggtttctaaaaccattctccaattaaaaggaaccagggctgcttggagaaatggctgattgtaggactaaggcagaaaatatacaggctgagcctggagcatctggtagtgccaagcagtaaggaggtgcttcaacggaaacacaagtgatggggtgtgtcaaagagataagataactgaaagagctcccaasagccaaagctggagcaacttgcaagacaaagtaaaggaaaaatatattataacmaaaagtataaaataaatattcttgactctatgctgacatgattgaataaataaatgggggagaataaatgaaagagaatagacaaatctgtgcaaaagaactccaaataactcatgaatactccaccctctagaaggtggagcctaactccctactygttaaagtatgagctatgcatattgacttccttccaggaagtacagtagggaaagggagtaaaaatgagtaactttacagtaaggaaagctgagaaatatgacctcagccaggtgatcaaggtcaacatcaacagggacacattctgttgatagtgtgtgccctggatataatgtgatgggaattgcatttgacctccgtggtcttcctcccacaaaaccttaaaccagtctaaccatgagaaaaatagtcaccaaatcccaagttaaggggattctgcaaaatacatgaccagtaattctcaaaaatgtcaaggtcattaaaaataaggcaagtgtaagaaactgttatagccaagaggagcctaaagaggcatgatgactgaaggtgatgtgggatcctggaacagaaaaaggacattaggtaaaaactgagacataaccaataaagttaatttagttcatagtcatgcatcaataatattttattaattgtgacaaatgtatcatgctaacctaagacattaataaacggggacttgggtgccaggattatgggaattctctgtactattcttgctatttttctataaatctaaaaatattccrgttgctccacatccacaccagcccttgtcaaaaagctcagtttcttcatttgtaaatgggacagcagtccctaccctaccactcactcaggattgttgtaaagatagaaatagaagtgaggtggtatagcagaagtgctttgtgaactataaagtgctatacccaagtaagaaatgctgccacttaggttgcagcatttgccccactaaaaaatattctctgaggaatttcagtttaatcttgatgaagtttttaatttttttgagcggagtcttgctctgtcacccaggctggagtgcagtggcatgatctcggctcactgcaagctccgcctcctgggttcacgccattctcccgcctcagcctcctgagtagctgggaycacaggcgcctgccaccaagcccggctrattttttttggtattttttagtagagacggggtttcactgtgttagccaggatggtctcgatctcctgacctcgtgatccacctgcctcagcctcccaaagtgctgggattacaggcgtgagccaccacgcccaggctaacatgttattgtaaaggttgtatgacaatgaattatgtgagtcccaagggaaacatttagtacagtttttttaattgctgttcattgagatacccagtgaaaaagatgaccatattttgggggcatttcctttctaagacttaaataaatatggaaaatgaattggtaaaaaaataaaaatctagcagataatcattcaaaatatgaggcacaaatcagaggccactctttctgccaagttaaagacaaaatccagcttggttttaggggtttttgtgtgtgtatggttgttattttgttttgcctttcaaataaacaaataagagcaagggtacaaatagcatcaatttacaggtgttacagaacaacatttgtttaatgtgactgccacgtgtagaatatgtccacatgataaatgtctggactatctagctccatcagtcaagacgttttacacaaaagaaaattcccgtattccttttatcaactttatttattcctggctgcaattacccttccctctaccccacccccaccaagataatagtgatgcctttaaaggatatgtagcagtttgttctttcattgctttctagtgagcttcctgtaacagaaagtttctggcaagatgtttttacattcagacccagatcattgtctatgacaaaacggagacaaaactgagccaagaactttaccaccaccccccatagaagctgacgctaccccgactcctaattcacaaggctcagggctgccaaccacatttgtcagggtttcttctccttgagctctgcctaggatatttcccccattattactctctagaggcgcgttatcacgttgtttgctcagttggccatttttgtcttgatgacagtgtaaggaaaccttggccccttggctacaaggtgtgtccgtgcggcagaggtagacaatgaccaaatacagagtttgttcattgatttgattcatcctgacctaagtgtggctcatcacagtttcattctgaaaactgacatctctgcagctacttsaacctcaggggattaagtctgtcctctgctaaaagtaccagtacctgttcagtgccttctgcaactagtgtgtcctctcgggtttttctttgtgattctttcctggttggttattttaattggttacataaaatagttattgtctggcttcaatagtcgctctaacctgacttaggtgataatagctacaattagttgaacacttctgcaagccagsatggtgctatgtgcttcacgcatatgtgaagcctttttaaatatcctgcatgctccttaggtcattctcaatttacaggatttggaaaacttagaacttagaaaacatgtctgagctctggtaagtaggagaactagaattcagggaagtctctgtgcctccaaagcacctatacacagtggtgctgcagatggatcatggctctgtcacactctgctcccaactgtgaccccctcctccatgacacttatgaacccctatcagatcaccctgaatatttatccaagttagcattcctggacccatctttacatttgctacatatttccatgcaaggaagcataaaggtccaaacaggaacttttacttcatattcatgttttaagcagaaattattcgtttaaaatctggttgatcagacttgctttgagattataaactaccattttgtaaactttgaaatgtagagttcttcagcttgcattaaactcaatgtttttctctttttgatgacctcacacttctcaacaaaaatgtaatactcaggaacaccttcattcccaaagatatttcatccatgtccccataattatatctgaattcctgaatggattagataggttgctggagttgagcctacataagcagaaataaaaagaggtgagaacatctctctcttcttcctggactctgctgccaaccttgtgcattgatgatgatgaagagaagagcaaacaggccacagacctggcttcccttcccaagaggaggacataaaggaaagcatgctgagtgaatatccacaacctrtgaaggcagaagaaatattagtctctaatttgaaacagcatcaagtaatggaaagggcaggaaccctcaggtttartctgaaagtttcttctaactagttgtttgtggctgatagcaaaggcaacctcttggggccttattttccttacctataaattgtaaaatatcagcattggactctttgttaacacatttatttatgtctcttcgtatttgcaaaaaataaaaaaaaaattgggggaagatttttttaaatggtagaataaaaaaactagaatagtgccagagagaatgcctaggcaaaggaaacagatgcttccattgatgaaaaagttgggcagaggttcctggcagcctaggcaaaaagggtgatatgatagattatatcattctcattatctgaaaaagaaaaggagttggaggagcagataaaagaagaggaaggagagaaagaaggcaaaaaagcatcagcacatcaaatcatcagaaactccaagctaccttctagaactctgggaggaattagaaaatgatgtgtcctggcaaggcgtggtggctcacgcctgtaatcctagcactttgggaggctgaggcgggtgaatcacgaggtcaggagttcaagatcatcctggccaagatggtgaaactgcgtctytactaaaaatacaaaaaattagccaggcgtggtggcaggcgcctgtaatcccagctactcgggaaactgaggcagagaattgcttgaacccaggtggcggaggttacagtgagccaagatcacgccactgyacttcagcctgggtgacagagtgaaactctgtcccgaaagaaagaaagaaagatacacaggaagaaagaaaggaaggaagaaaagaaggaaggaaggaaggaaagaagaagggagggaggaaggaaggaaggaaggaaggaaggaaggaaggaaggaagsaaaataatgtgtgctgtagaaaatgatggtgtcttcaagagcagttttgagggcagaaacattggcaaaagcaatctccttttgaccatattttatattgattgttaataaaaagacataattcaaaacatgactctctataaagatatgatatggggagctaaagtaatccagttcaggtatgttgctcactgacagtcttacttggcgtaaggataaagcttagaaaatctaaggaatgaatacctggtatgacttttaagatgtttttcttgaatatcaattgccttagccaagcttttgacaagtatgacatgctacagacagttgaaaattgagattccttacacgtcctttaatatgcaaaagtaatcttggtttatgaaagttctcccttccaccacctttccattccccaggggactctcacctgtctacctgcagagagggccaagaaattttattattatggtaataatagtgggggaagaagagagagggaggggatttcatttcctactgtagagaatgttatgatattggatctttgctttacaagcacgtattactttcaatattaaagattaaaccaaagactggtggaggtggggaggaagagagaatggaaataaagtacagttgcatgtgaataaaagaaagttatgcacatgaagccatggggcagccctgtcacttagacattgctctacaaatattcattgaatgactaaataaatagaacatggaaaagaggaccagctggcaagagtcggaagccagaagttgccaactggccacctcaactaggaaacaaatggactgtgccttctttaaaacactttgctttgttcatggcaatatcctaatgccctttccaggatgagcagccccaaaatgcatctgcagatctctaaacggttcatctgttcatctgtcaactagaattatgtgtcagaggcaggctgccaaaaaccactgttttgatccaggataattggaagtgaactcttcctcctgtcgtcagttggccagcacttttggtcgcttcttgaggcctctcctggaatatccttcatttgctctttcagtcattcttttagaaatattgactgagtgcccactgtgtgccatgcactgttctaggctctacggatccagcaaygaaaaaacaaataaaactccctacccacatggagcttccattgcagttagatggagacagattagagaaataagataaatataccctatgataagcgccagggagaaaaataaagcaaggcagagggatgggaagtgttggggaggggtagttcttgcaacctcaagtcgagtgatgagggaaagccttactgagaagctggtatttgagtaaagaagggagggttgagggaatgagctacctggacatgcaaagcaagaacattccaggtagagggaaccataagtgccagtgccctgtgtaaagcgtgcctggcatattcaagcaacaggaagagggtcagtgtggctgaggtgggggtaagctgtgcaggacatgaaaggaagtggcaagagaggaggtcagaggacccaatctgtagagctttgtaggtcattgtaagtgctttcaattttacccagaatggtacaggaagtcattgaaagttgtgatcaaattgcatgtgtccttttctgacttgtttctgtcattcagcccagttgatatgcrtagccatggttgattcttttccattgctctatcttattctactgggtacagcttggccctgtgggtggtttgggccatacatcaaccgtggacagtggacaaatctatgtggccaaacatttgaaactgctgttagcaaatagcaaagtagttggtaaagcctgtcttctcttgtttagagcttgaggggttggaacaggccagtggtgttgacatgctgctctgaggagccctagggaatattccttgaacctcactttttccccagcctctctttattccagaccaactcttaatcagtgttgtattgaaagtgtccccataaagcctccaggcccccagatttgaaaccatttaaataagagacctctaaagttctttacaactttaaagtacagctgtcacatacatgcacacacgtacatacaatatgtttaaaatgttttgatgtttattttttcattggtaaatgctttaataaaaggtcaaatttactttcactttcataattataaatgtattaaccattgtatgtagctcaaatgtaagatactagtgaaccatttacaaagaacaagcagctttcccatcttccattccctcttccctttgtttctcagcatggagggcagccctggctcgtgtggggagggtgtgggagcttcacagaagcacatcagtgacacgtcaggagcgtgcccccagcatgcaaggatgcagaatggagaaggggacacacagctgggagacagaagggaaagccgaaatggttgggacattggttactgtgagcagatactaaattgatgagtaaataagcaaatatatttaggataactatacaaaagccaggtttctcacggttggaaatgatacttacaaacacaaaaaggaaaaaggctggaaagaactttgaggtgttaaatttgaaatgtaggtttcattatgaatgtaggcttttataatctatatacacaaataaatgagggaatagttatacgtgtgtgtgtgtgtgtgtgtgtgtgtgtgtgtgtgtatagactttttttttcaagctctgtctgtctaggaaacctcaaagcaatggcactccagaggcaatgagcacatgaagcacacagatattggattctaaataccattctttactaaaaagaaaccagggcttcttggagaaaatggctgatgccatggctggggaagggaaaattaaagataaatctgaaacatcttgttatgccagaaacaaaggaaatgttccagtgatgatggaaacatattaaaaggaccaggtgccactttgggatcatttgagcttcaaaataaataaagcgagtaatggattccaatatagtgaaaaaaaattataatccatttgactacgccaatttaaatgaatatgtgaacaaataaatggaagacaagggattgttatttcttactgaagaatgaaactaataaatataaaaataatgaaggaaatataaatcaccatttggtagctgtcatagaggtgactgattccggtggtatttatcaatgaaggcaggtaatagagggtatatgaagagtaggatattggtgcattcctagaatagtgcctcacaaatactaataaattaccagagagaaaatggtaactgtgtggcggagacacctggcagacaccarcctgaccaggtgatcaagattgacatcaccagtgatgcaaaagttccacatcctgtaccctctgcggtgatgcaccaagcagagcccagcttcattctgagtatttcttccaggacagcatcacctaagtctggcaatgaaacctcagagagacccaggctgagggccatcctacagaatgtaaggcctgtaatctttgaaattacataaagacatgaaagacagggaacagtagaggaactattccagattggaagagacagaagaraacaaaatgcaaagtgtggtcccccgaccagcacatcagtgtcatctgggaatttgctgaaactgcagaatcttctgctcctacccccacccactgaatcataatctgcattttaataagatccccatgaacatttaaggttgtaaatagccagggccctagatcagtgattcccaaacacaaggctttattagaatcacttaggaaaactttatgtaaggacagattcctactcccctccccagatctactgaattagacactaaactgtggagtctacaataggatattctgaagaaactctcccagctggttctgaaaccaaggtacatctaagaatcactgggctgtaaatagtgttgacatatgcataagtgaccaaagtgggtctcattgcacgtgggcctcaaaacacaggttggagaaccaaactaatcgtcgccacaattcctgctccaggcaccaagacatgaccccaaacttcagtccaggggtggaatgtaaataaatattgctgattcacatttcagaagttttctagaacatttaagtggatttgaaaaatactctttaaaggattgtttgtacaaacatcatactctttccattccttgtttggcatagagtttaatcagatttaaaatggtgagagttctgtgtaaggttgtatgtttcttttcttccagggcatgtaaaacaggacatctgggttttatcattaaaatactaaaacatgtccagtatttttaggaaatttaggcctgagtttatgtgctacaggtgttgagtatatttgacagaaggctggagtctagtaacttagagttaaaaggaaaaatatatgtgtgcctgccaattttgtttcagataatacttgatgaaaacatttaagttttgatttttccagcactttgaaaaataggagaaaatagaaataaatcttttagtccattttaaaggcaaatagttttcagatattctttgttttatattatatactgagctttcatcaactcatagcaaaacttsctttgcagatctcaatttgcctatagtacctcatgggcataaaaatatcctttacaaatttctgacctcttccagaaaagatataaaagcatagaattccaagcatgaggctggttataatgtaggtatgttctatgaatgaatataagaaataatgctatccaacacagagactggggagggactaagtggtggaacagcaagggatatgtaataagacacttcaaaaattgtaatttccaaattcaaagaaacaccacaattcaatgcaggtgcctcacaaaatcaaatgccatatctagaaatcattgactatatgcctattaatattagtaaaattggctaacctttcaactgtgggcttaagtatgtaaaggcactttcatattatgtcctttagtcccacagttctgtaagggaggtgttgctcgtaggcctgctttcaactgaagggcatagaagagagattaaataattgactcagtatcacacaattggtgatactagagctgagacttaaagccagcacctctgacttcacacctggcctaccctacgcatctagtacagaatatttgtccagtcaacagaccaaaaaaatgatcttttttttggctttggtttcgtttggtgtttttttgtttgttgtttgtttgttattggtataagwtgtcacgttttaatatttgaatggtgtttttttttttttacttttcagtttctatcatctatgccgtaagcacttcccaagtaaatatttcttgaaagagatttcttgagccagatgtacaacatgtctttactcctctgaggttaaaactcaccctttctctacaaaaaaagcaaggctggtatttggcccccattccttctgaggatctttgtgacccctaaattatcagacccctaggctcccaaacaggtctgtcacttttacaggaactgtcaacacacccccgaaattttttaactgaccaccctgaagaaaacaagcaggctttaacttgagcttgctcaccaaaatcactcaagtccttccagctgyatggccccagtctccaaaataaatccccttcctctgctggtctgaggctcacttcagcctccccacgtcctaggctttgaactcctgtgacttttaaccttggctttgtgcctgttgagctgttaatcagggtctccagcccataatcagcagctggtgagcagctgctccctcctttcctaaaacagatcctagccagaattttccctgaagggctcttcctgccagcttcctctcttctaggaagcagaggaagttytcttcctttggcttctccctctctggccattcctaatgaagacaaatagcaatggcaccattatttctcctgttttccttgttggggcctcccttctagaattcttccccaaatctctattctcctctgccctttcccttctgtagcccagtctgcagggcacagctggtggtaccttctggctgaagctagaggggaaaagttcaaggccagcatatctgaaattctccagacaagtctgccgccactgccacctcttggactccgttcagcctgctgagagctgtgtcgtgggaggccctaggctggacacccttgttttcatggcctggactcttctcccttttgttccttggcttttgcctaactaggacccactgcccccatcttttaggccatctgaggttagtgctctagcaattgctgctgctcccagctctcctcgtcctccttatccaccacttcttcacccagtaagcctgcctatgaaggcctacagagggagggcaggtggcagtgtatcagactgtcttcacagagatgacaaatgcagcaagttatgactgtaggtgtcctgaggtgacatctgggctctagcctcagcattaccactcactaactgggtgacctttgcaagtcacctaacatctctgattctctgtttcttcatctatcaaataagagaaatggactaaataatgtctaaagtcttttccaattcaaacattctacagtccattgatttattcgttgttacattatgtagtagaaccgcatagctaaaagttggtctgctttctggattattccttcatgacagccttggctatgaaataacagttggccttcatctcctcactttggagtctaaagaaaaatcttccttcatgtcttggttttagagttcctccaatgacakattgattctggatttatgacaccaattataaaatcctatgctgctgtttctgtttctacctcctataacccacccaccccaagcggtttctagagaaggaggggtgtatttttggtttggccaggtgcaggtagaggacctactgaactactggtggagacaagcccctgctatgtcctcttcaagctaaaagagctcagagagacccctgtcaatattgcagcattattctaaatgttaattaatgttcctttgaaaaaaaaattacatggtcaaaagaacttgagaaatactgaatattagctgcttcttaaaggtttatcgtgcatattagcatattaaagcctccaaaaatcctgcccctaaaaaccttttgtttatttatttaggagactgagtctccctctgtcacccaggctggagtgcaagtgcagtggcgtgatctcggctcactgcaacctctgcctcccaggttcaaacgattctcctgcctcagcctcccaagtagctggaattacatgtgcatgccaccacacctggctaatttttgtgtttttctttttttgagacagagtctggctctgttgcccaggccggagtgcagtggtgccatctcagctcactgcaagctccgcctcccgggttcacgccattctcctgcctcagcctccagagtagctgggactacaggcatccaccactacgcccagctgattttttgtatttttagtagagacagggtttcaccgtgttagccaggatggtcttgatctcctgaccttgtgatccaccctccttggcctcccaaagtgctgggattacaggcatgagccaccacgcccagccaatttttgtatttttaatagagatggggtttcaccctgttggtcagtctggtctcaaactcctgaactcaagtgatccacccacctcagcctcccaaaatgcttatcctagaatttcctgaagtcatatggctccagacactttcttcacaaaatatttaatacttaatatctgggtagaacatgtgccctgaaacacagtttgggaaacattaccacaaaacattgctgatctgtttctgtctggggtctttggagcagaaagggataacaacactttccagaatatttattgagcatctactttgtgcagaacatgtgggaataattcaaaattggcagatcaatctgctcatcaagatttcaaaatcaaatgctgcagagggttgccgcatatgaataagcaggccagtcaacaaacaagacaaattaagtactaagtgcagcttggaagtgctgcagccaggctgctgggcccttgtttgactccccgaattgaattccatactctcagctgtcagtctcaagttcctttgctttgctccaccagtgcggttaccactccccagttacaggatctcatttcaggacattcactgtttatatcttaggtagttggtgggacacatccagcatttttatcctgtgctgaacaccctagaatttttgcctttcatgtacagctctgttagtttttactcagaattaggatctgttctttgcctggaaaagatgatgaacttttcaaaaagcaagaaagatgatgaaacagccaatgtcatgtgatgtggtttaatcccagcccatcaaatgttgtaaccacagtccagtgtacctgatgtttcctggacaaaggccctgggttctcagggtggctgccctttttgaacctgtctatgactcacagctatttttccaggacttccccacctaccaagccatgtccctgtgtccctacctcctcagagagccctgacccagacctcttcctcttctgcttcccacccttcactgccractttccttggatgttccattgatatgttctttctgaacatttttcttgccccttttcctctgcctctcctttctggcttctttgaaagaaatgaaggatcattcttttggagaatctaatccttggaaagtccctctctgctaaacagtgaagggaagctggccctgtaataaaaaggccaacattgtttccacaagtgctacatcttgaagaaggagctgcttattattttttaattatcagtattagttgacatttattgagcacatactactcctctccaagcaccggagcccttcatatttatcgtcccttttattagtttatgaatataaagagactttatatttatcatcgcttttattagtcaccacactccttatgataccgggcattttattatccccatcttatgagygaggaaataagagtctcagggtaggtaggaaacttgctcaaggtcacagaaatagtgaaaggcagagccaagaaatgaacctacattcctttggctccacatcctgtgtttttctgtttcccagcacaagtgacatgagtgagaggtgcttgacaacatcttgttttgagttatgcataaaacattgcagccaactccatgttggtgctgcccttcccagaagactgtccaagtgccttacttgcccagggcatctggggactgcagtacgggcagtaaggcacgatcatttaccctagagctcacagccccagagctgcctacttgatcttcaccctgaggagagtgattacatacactctcttccccactggaacagagaagctgaggagattagaattccagttttcatcagatttattcccttacgagtttcattcacagatgctcacccaacatayatgtactggacagactgctgatttaattatcttcttcttaatggtctgttctatctaccagtgtccagtggggccaggatgaattgatcttggtgggatgccaatatcctttgtttgttcacacagatttgttttcagtggaatgtacgccaacacaggcacaccattttattcccttccgctctgtccttcctgctccatcattattgttggctggttgtcggtctccttctacttgctcaccattcacattctaattggtgaaaatttgcatttcacygcaagtgaaaaagtgacttgcgggcttacttttgcttaccagtgacaggtgcacacctgcccgaggaccaagagtgaatcacagcatggtctccaaacatcgtgaccctgctcagtggccctggatgacaaccttcacctgtccccttttcctaagtagtgtggcctgtggccagaggcttccccatccagggtacttgcgtaagctatgttcttgtccttcactcagagaacctcagaatgggtccagcccattccagtgcagatgagaaacccaccacactctcaccctctgctgcccaatcatctcagggaaaatggagtcttccagtcatggaccaaactgcccataggtcttctatgtcatggctcccctggttgccttccccagcaacactagccttctgagcctcttgggtgaagatcaagcaggcagctctggggctgtgagctctagggtaaatgatcctgccttacttcctgtactggagtccccagataccctgggcaagtaaggtgcttggacagtcttctgggaagggcagcaccaacatggagttggctgcaatgtattatgcataactcaaaacaagatgttgtcaaacacctctcacttatgtcacttgtgctgggaaacagatgagtaaaacaatgcctgcatccaaggagctccatctgcagtggcaaagtccagggggatagtggtcaccgtgcagtataaaaagtgcagcaggaaggttatattagcacagaggacccattaattatctgagggctcagggacggcctcctggagaacatgacatctgggctacttggaagctaattggatgtgggaatggaaagtgaaggagttaaggactggaaacaggatgggctttgggtcctccaggtaagaatgtccagttcattcttggatatacaagataagagctagacatttggagccagcagcagagagaggatgggtaaaggaaagttagtgaaggaaaacatatatggagaggatgtagcataagaagagattcgagaagggccgagacagagcaaggcatggtagcacacacctgtagtcccaactactggagaggctgttgtgagagaatcagctgaacccaggagttcaaggcttcagtgagctatgatcatgccactgcactccagcctgggtgacaatgagacccgaactcaaataaaataaaataaaataggccaagacagagccacaagaaacacagcattcaaaaaccaatacatgccagcagagtacatgggctctggggccggcctgcctgggttggaatcccaccttcaccactttaattagctttatgatcttaggcaagtgattgcttcaatttcatttctaaaatgcaaatgataaggacatatacctcataggcttgttgtaggattaaatgaattaatacctgttaagtagactctgtaaaagcatttggtgtcactgttatttcactgatgtcggaaaagggcaaacccagccaatgatagagtcagcactgcccagttgagatctcctcggtgaggagaggtaaaggagcactccttataggaagcagatcagagctgaggagggacacgtcaggcttgggatgccaccacctcctggcagggtagggactgtgtttgtcttgctcatcatgtgctctagtgcccactggagtgcgagctctagagggtagacactcaggaatgatttgctgaacaagtatatatttgttgaagttccctgacttagctggagtgaaggggctgcagggagcaggcagtccagaggtggcagcagcttggggtgaggtttactagggggtataccctgactttctggcctctgcctgggatacctagctgtctgggtgagtgagcttcagggatggaatctctcacaggccttctcccacacattcttctctaattcagaaggaccctgtcctactctgcatgtcataggaaacttaaaattttagatacatgacagaataggaacatttgtaagcaactggtaagcaccaatgccacattctctgtgacttctcagaatgctaaaattctgtttctaaagggaatgcgactcggctgcatcattctgattctggagctaagctccgcacagtgtttgctgaggcatttctttgcccagtagatcagggtggctgtgtggggagcaaagctttaaaaatttaaaggcctgtgcttttacattaccatgctctactatcttccattttctcttttatgaagattagactcaacagtaaattagcaaacagtctaatttactgttgagtctaatcttcataaaagagaaaatggaaggcagtagcatggtaatgtaaaagcacaggcttttgatttggctcattcctactttgcaggtgtgtaaccttgggcaagstagtttactcactctgaatctcacctttctcatctgtaaaatggcagcagtattagtaccagccttgtagagctgaaaggataggataagcagcgtccctctcacaaacctaccatttacatggagagtgttgttattgtaattatgattatgaaaattatgcaaagaggaaaagaaattgatttataaatggtcccacaataggatcaggatagttcggagctaacagctcagttatatcaagacattttatgtaaactgttagtgatggattttaatctcatcatattaaagtgggatgaaataagtaggaccctattctagggccatcaattaatacaattacaaaaggggagactctgcatgagatgaggcttacttctgaacagcatttaataattggcttcacaaggaatgatccattcaattcaattaactatggtgagagagaagaggataacacattctgcatagctgttggcaattccccaaattccatttaactagacatggtatttgcaaatctcagtgaaaatattctccctagttgattttaaaacagtaaataactctagtgaacttagaacccaatttctgagtacagtatttagggatttatagttgaagaatttgagaataatcaactgtctcttgcaaactgtgggcaagccattctgcaaacaatagaaagatacccagaataacatgttctctaccctcaaggaggtgacaatttagagaaaatggacatatacacaactggtttaattgcaagacagagtatgcttcttactttttttttttttagttttgcttacattttatttttacttatacacaagggtaagatattatagaaattggtgtcactrtaagtctaaaagagcactttcagtaaatataaaataaaatttcataatgatgcatcttagcacaaatgaagcaaatgatgtctacaaatccatatccattggtgttgctggctttaacacacttttcttttaatgttttgggataacatgaattattacactttctgtgtgatacagttatacttaacacattctaaaataattaatggagttctagaataagaacactaggtttttatagtatgtatattacattgttagttttaaaaatattataaccagatgacatcttagtgattattcaatttatgttacaggtaagttaggtaaagcccagataggttaagtgaattccgtatgatttccagctagagttaggcttggaattcaagaatcttgggttctttctcttaggtctgcatgttttctgctataccatccttaggaaactctgttatctccttacccacaatttcatgtgtagataaaataaaatgaagatcataaatagtattataatgacataaaccaatacttctgtcagcttagaattgggacttgtctacaattctgttctagtgaacagaaaatggatacggatttgtagcttcttacttttcttatacttgctttaactgctcccaccctcatgcctagcatagttccaggcaaattcacaggcatgcagtaactgtttgtggaaaaaataggcattactacagagatataaataaagtgctttgggagggcaactgggaccaagaagtggtagaagaaccagatttctaaagatgacagcatataartggtaaagtaattatccaattattatatcaatcatacttttatatataattataaaataataattttatatataattataaaaaatctgactataaaaattttaattataattatattattatataattaaatataattaaaatataattaattatagttatatataaataattattaattgttaattttatgtataattataaaaataattatccaattattatatcaataataccactatttaattacttgcttatgttattttcccccatgagatgccaagctatcaatgggcagataccatgtctgtcttgtttactagcgcccagcacagtgcatactatatagtggatactcactaagtatttattagaagagggaggatcacctcaagtcaagatatatttgtcaaggttcttttttcagttatgagttaacagcaactcaattcaaatctgttcaaacaaaataagaaattggtgtatgtatatggagtcatcagagggcttcagggatggctggatttaggaacccaccaatgtttttaaaaatctatcttcatcttttcttggtgttggcttccttcttaggcaggctttccttatattatagcaaagacagctctcaacagctccaggctcatatctttacagtttatgattccaacaaaaaggttgtctcttttcctgatagcttcagtaaaagactcaagaagggctttagttggctggtgtaggtcatatgacaatctttgaacaaatcactgaggtcaggcttgcaggaaggagtatggtcagccttatgtaatctgtatagattaagatgttagacagccaaaacaaaaccccctacacaaggaatcagattgaaatgagcctaagaatagacaaagaatagaaaatgatacacatagtacaattggattgttatctggataagtggcrggtaacagtaaaaaattaatactggagacgtaaatttagagcaaatagtgccatccttgaaagccaaaaagagatttagagtttgttctgaagacaaatgtgatgtagtttgggggtaaggggagataatctgagctgtgtttgaggctctgaaaaagctacctttgggtacttgccttttcccctctgtgtctctcctaagcaaagagtcatcagtggaaccatgccaagcacagcaaggagttcaagagactcttctgcacccacttcatgtcaaggaggatgcctgggtgtgggaaacatgctggctgctgtatcctcagaactgagatcctggcatgaatgaaccatggcccgtgctttaaggagcttatgattagaagaacttggtctaggacaacattttatacatacatacatacatacacacacacatacacacacacacacatacacacacacacatacatatatgtagccaagcacagtggcatgcacctgtagtaccagctacttgggaggctgaggcaggagtttgtggccatcctgggcaacatagagagactccatttctaaaaagaaataaaagcttaaaaactaaacattttatatatatatatatatatatatatatatatatatgattgggctattgtaatagaaacatgctcttttattcctagcaatgagccagggaagccttgagagaagaggtaacatttgagttatccttctcttaagagaagactgtactcggggcacaaacccttctcagggcagtcacagattcttcttggtccagcctgttagttaggaagtgggatttagagattccagtcttcaggatttctgtgttctgtcacctgaaattcagcatctctacaacagtacttgcagcagcagagcagtcacagtagtgaacatctatcccttaactgcacactaagcatcatgctgagatctttagatacactctccaacttcaccctcacaacaattttaggaggtaaacagtatgcccattttactgaaaagggaattagggctcagagcagttagatggcttgcctcaggggcacgcacaggaaacggtggggctgggagtgcacacaggtctacctacctccagcgccgggctccgccactacaccgtgctgcctccctccagcttccccttgttccaaatgggttacagtctcaatctcaggtacagttaactggtgaggccagagaggtgatttacaattttgcgctggtactacagaaatgacgcctgatctgactcaaggccctggggtgcagaaaaaggtcactaagcccctgggtgagttctcaaactccagcgcatataagaatcaccagggagtttatctgaaaatgcaaattattgatctctggccttaagagagcctgatttctcagtctgaggccttggaatctacatttgaacaaacacctaaacaccacccccagtgcttctgatgtcagtgctccacatttgagaagcactgcctctgcaagggtgtgtgtgtgtgtatgtgcctgtgcatgcacacatgtgcatgttgtgtgtgtgtacatgcccacatgtgctagtcaagatgtttcagtaaagctccatggaggataggtatggatgtgcactacacataaactacttgaaagtagctttgtcatagccgggttcagtggctcacgcctggaatcccagcactttgggaggccgaggtgggtggatcacctgaggtcaggagtttgagaccagcctgaccaacatggagaaaccccatctttctaaaaatacaaaattagccaggtgtggtggcgcatgcctgtaattccagctacttgggaggctgaggcaggagaatcacttgaacccaggaggcggagattgcagtgagccaaaatcgtgccattgcactccagctgggcaacaagagggaagttctgtctaaaaaaaaagaagaagaagaagaagaagaaggaaagtagctctgtctagactttcattatattttgtagactttaccatttgaattcaacctttgcagttagaatgaccagatacccattacaaatgatcatctctttgaaaacttctgcttggcattttcaagaaacttttyggcagaaagtcatttgtctcctttttctggacctgggaacagcactgggaagtgttcaggccttttcccaaatataatccctgagcgtttggaagctgagaatcctccctgcccacggcctcctgggactctggatggcctgcctgtctgccagagacactgagcaactccatgctggaaatgtgggaaagatggtctctgtcctggaggtctaagggtctgctgggggagacagaacaggcccatgtgaaagagtcaggcacacaaatataacaaaaataaaccagaggcagatccatgcagtggtgagaatacaagtgaaactttgaactcaaggtcctacattaagtcraagagaagtaggaagaaatggaatgaaaggtgctaggtgaaccatgagaaaagcctccctagaggaggtaagcttcattcattcattcattcattcattcattcatatgttcactccttcgctgactcttgtttaaacttaccgagggcagatcctgacaggtcaccgacactgctgcttacccgtgagcatagcagatccrgcatctgccttaatgaggatcacagcactaaatgtgcgctagggtcagggtgatgtgggggcaccacagagcatgcagtgtgtggacacactccaggtgggaagtcaaggaagttctgctcaagaaaatgatgtttttatcagactcctgaaggcagcctcaccctttcctttagggggccagggcgygagtacaagggaggccccagcatgttggccttcccascttctcttcccatcctggcttgtgtgccagagtatgtatacctcaggcctcaagttcaaaccctgtccacacatcacccccacccccactgccctctggcctggctttaggcctaggggttacaatctaccctctgaaggactgatccagataaacagyccttgcagaccagcagtgggcttggtgctgtttggacagggaatttgggaagcgtgggtttacaagggataaattatctagaagtgagtgtgcrgcctatggacaggcacgtcccctccaccccatagacttcttactctatggagagggcacagctggaygacagccagtgtggagccttctgaaacctggggtccagggcaggatcctgatggcatggtctcagggcagtgctgcctaaaggatgagtagggttcaatgaataaaatgccaggccgtgtgtggtggatcaactgtaatgccaatgctatggaagcggaagcgggaggatcacttgaggccagaagttcaagatcagcctgggcaacatagtgatactccatctctacaaaaaaaaaaaaaaaaaaattgaatctggggtgatggggaagccttcctgcagaaggaacaaccagttcaagattcctgagatgttaaaaagcctactttacctccctaaaaggagggatataggggagaggtgaggtgattggagaatggacaggggcctggtgggccaaagtaaagatttggctttgcagaggacacaagcragacatggtggaccagggaaaggtcattttgaatgatgcaagaaaattccttccaaaatgagcatgtgtgacaccaataaggtatttgatgtgaggagagggagtaaactgttctrtttggctaagcccaagagtactgagaaaagcaaaaggaaggaaaaaaagatattttgggaggggcagttgtggaggagttgtgggcatggtccagggggttatgatgtcagggtaagcccagaascttctgggagaggtgcttaaagaattgggctgggggccagattctctcctcattctgtgcttactattgaaataagcaaaataatctgctaccattaacacctttctgctctagtagcactccctatgcctaaaccatagtactttatatttatatgatttttttgtttttctgtgtgattgcacagaaattctttctggattggcaacacatcccattttccacttagtaaatgtgaccaccttttatgctttggtcaacattttgacatttgtcactgaatcttcatttcctttttgtgtcatttattattttataactagyggtggccctctcaccatttaatgcttataaaattatgaatacatcagaccataataagaattgtccgtgaggcttgtaaacagatgttggggtgtgtgtgcgtgtgtgtgtgtgtgtgtggtgtgtctgtgtgtgtgtttatgataacagtgcttacataatctcaacaaccagggccctggggactcacactcggcaatggaacagttggtttaaattaggtttccatgtgaaatatggtatcgctgtttttttcctagcattgtgggaaagtatatggaaaatgatttgactgataggaaataaatctggatgagtgatcaggattgtgacacaaaccaagtggtggtctccacctgccctgtgaagcagacctctccagggggaggtgagttaaccctttccagccactggactagtaagtcaatgcatggtatcagaacagcctgaaagaatgacaactttccagagaccctgatttgccatcaatttcaactagaaaggagctaaagccatagagacaatatagccagaggcctcaacaactaatgagttgggtggctttgagaaactgtttttttacttttcaggatctcatttttatttgtgagaagtgtttgaatttccaactcaaagagtcagtagggttatgatgctaagtgtttgctgatggtttcccattttaggatagggctcatcaaaagccagtcagactaaaggaagaattagatggatgcaccaatgactcagtctctgttagcaaaataatttcttgctctagtgagccagggtttcacaaaggtgacttttaaccaaggaatcaagtgagaggacaggcatggagactgtgagcaaggggttactcatagctgcaggagacgggtcagcactaggaatcccagacagttcctgggatgatgtggaccagggtttgtcccaagggtctgattccagacctgttctcctgatgccacctgagggcccagtgaagtccagtacagatggagggcagaggcacatgctgggagcccactaggctcaggactgagcttgagggtggcaggtagcccagcacgttttgcttcagtctgtttcagaagggaagaggaagattattaattactccagtgcctctggctcataccagagaatagacctgttttatcactaaaactccctgttgctctgattttcctgtttgtttctatgtagggataggaaagaggtgtgagcaaccattcattttgtttttttcatctctttagtcatattttggactcttctcagtattttctccttttattcctgctctgccttcacatatgcagctcaaaactgagtgcttaggaggacctacccagagccaagtctgaaaaaactcacctttcggctgggtgcggtggctcacgcccgtaatcccagcactttgggaggccgaggtgggtggatcacttgaggtcaggagttcaagaccagcctggccaacatggtgaaacccatctctactaaaaatacaaaaattagccgggcgaggtggcaggccttgtaatcccagttactcgaggttgcagtgagccaagatcataccattgcactccagcctgggcaacgaagcaagattctgtctaaaaaaggaagaaagaaagaaagaaactgtcaactttcaccagatgaaagagcactgggctgggagtcctacttttgacatcaacaagaattgtgaccttgaaaagtcacttctcccatgagccatagattctcgatctggaaaaatggggttgcactgccctctgtggttgctgccagcactcaatgccattaattcttatcattttatccacttacaggcagtatgccattgaccttgagctcttatttcctgcagttgtcatgggtcaccataaactctgtgttccggcctctctaacttagtccagagaaaagtgttgctgtccaggcttcagcactgatgctgaaccaagcggagcttgtagggccatgtgaggtcaagaccaagactttggtctgttgacaaccaagcttatcaacccagatgctagtcaggatagagaaggtaacttaggtggacaccagcatctaagcaccaaagtaaaggtggcagcaaaataatcatagagcagaagcagatgatttagaggctgcatatcataaggggagggtgtagacatggattatttttaaatattgtcctccagtctgtgtagcaggaaaaacraatcacattagaataactttaagcccagaactgaagaacattagagtttgtgtaaacacatcaggcattttgtgagtggttgataatgcaacctctggagaagacaccctaagttcaaacctaggctttgctaccttcaacgtggttgaagaccttacacacatccctgaggacagtaacagtccctgactcttagaattgttgtgagagataaatgaggtaatataggtaaagtgcttagaatggctcctggcacataataagtgctctataaatatttgttcataatattttgtcatttgaggggcataatagataaagcatttgtaaaagattgtttaaaaatgtttttatttttcctttgatattatgtattttaatacttagtaaatgtctttaactgatgggttaagtacatttcattttaatgtccatcagtcaaatatctttcaatcaaaattatccttaggccttattttcttatagtcaaaagaaattttttcaatcaaaggattttatgaattgcctttttcagccttcctgttttaaagaaaataaagagagagttataagagattaaggacctataggtctctttttttttttttttttttttttttttttgagacagagccttgctctgtcgcccaggctgcagtgcagtggtacaatctcggctcgctgcaacctctgcctctcgctgctcgctgcaaccttcaaccttgaagctgaggcagggttcaagcgattctcctgcctcagcttcccaagtagttggaattataggcgcctgccaccatgcccagctaatttttgtatttttagtagaaacgggctttcaccacgctggccaggctggtctcaaactcctgacctcaggtgattcgcccacctcagcctcccaaagtgctgggattacaggcgtgaaccaccacgcccagccaggacctacaggtctttcatttcctaataccaaattgatatttttagaaaaacaaagaatgcttttggaaaaaaaaattgccaagcttctaggacataattcccgtgaatgtctctgtgtgttttccaggtgagctcctgggtgacatggctgatcctcacggcaggctccatggaggagaagcgagaagtcttttcatatttggtgcatgtggccaaatgctgctggaacatgggcaactacaacgctgtcatggagttcttggctggcctcaggtatagtcagtggggaatatggttatcttggcacaatcgcttctcatcacctgaatggcactgaattaattgtccagggactcacctttacccaagccaggtaaytggaaatgattaacttgggaaatgtattatcttctttcagcaccaaaggccctgtccctcaaagatgctgcagaattcagcccctgtgggccagtcacaatcctacttcactgggtctgctgtgatcctgtgttctttgccaagccaagtgaaattacttggttgcataacccgatcaaccccaccactgactattccccttcctgtcctgtaaaccccactgttatctgtctcttttcaggcctgccttatgtagtgttccagggctatatgctatagaccaccaactgcccttagtaataacagtggctagcattgacaataggcctccaataatgtaagctctcattattaacaaacactatatgtcaagtatgagctatgcacattccctatattgtatgttttaattctcaaaacaggtttatcaggtagatactattcttattcccacattatacaaaagaggaagctaaggctaagagaaattaagtcattcacccaaggtcacctggcattgctgggaatacaggcaaccttggtttcggagcccatgagcttgaccactatgatatcctgttcttatgctttttccatcaagctaataacaaaatcaccattctgttcatcaggttgcctgctttatccccttttagcctcagctacctggcataaagtaactgttcttactcctgtgggwggcagcatggtatgtgaggaagaagagcatgagttcttaagttagaatcaaattaggaatcaaatccttatccaggaatcaaatcctgattcccccaaggaatacctgtgtgatccaggcaagctacttgacttcattgagcctcagttactttgtctgcaaaatggggataatactaaaaagcacctacatctttaggtagaattcagtgaaataatatagtatttgacacatgtgcgtggcgtatagtaaggcctcataaagagaagctattgatattgttattgcttcctgagattcaccatcctcatgagggttctcactataaaggaatgttagttcataacattactgagatttttctttgattctccaggtccctaggtagggattctgggttaggggaggagatgaaaactcccagagttctaattttttttttgtcgttttcaactttcttaacttagaataaacccaaatgatcatgtccttgacatttaaaatagtcatacaaatgcatcaggcatggctcaaaagaaggaaaaagtggggagaaaaaaaaacaaagccttggagaacaggaggttatatccagatgatttagattctctttgtgatcaattttctataaagaaaacgtgtaggccgggcacggtggctcatgcctgtaatcccagcactttgggaggccaaggtgggtagatcacctgaggtcaggagtttgagaccagcctggccaacatggtaaaaccccatctctactaaaaatacaaaaattagctgggcatggtggcaggcgcctgtaatcccagctactcaggaggctgaggcaggagaatcgcttgaaccaggaggtggaggttgcagtgagccgagatcatgccattgcgctccagcctgggcaataagagggaaactctgtmtcaaaaaacaaaacaaacaaamaaaaaaaaacagaaaaaagaaaatatgtattacatttcttttaagaaaagaattatcatattttgataaagtcattttattttaatgatgcttatcattctgtgtctggcaagttggtgctggctgttggccagggaccttgcttcctgaccccacaacatgactgccatcacagcacggtgactggctccttctgaagtgggtgatccaagagagggaggcagaggctgcaatgccttttatatgatagccttgggaatcatacatagtcactcttgccatattgtactgatcacataggacagcatggattccttgtgggtggggactgcacaaagccacaaaatcaggagatgtggaccatgggaggccgtcttggaggctggctgccacataccatgttctagattctcttattacaggaacggcctcagagtgacctatggaggcctagagtgaatgggactttaagattcaactgagtttaaatccaaaatccaagaagaccatagaacctggtgatttccctaaatgaggaataatctcaaaccaggrcagacctcaacattgatcccagtgcattttgtctcacaccccagacccactgctgcctagtttcatgctcctatatttggcttaaaactaaactgatctttacagatagataggcgaaagtaccacgtataataggtcttttgttgacagctattctgtacacaggagataagtggccagatactcttatgatgcaatgattatggaggcagagcttatatgtgcacttttaggtttgaaagtgtttaggttccaagcaattaactattaccaacataatagagattttttttattttttaagcaattaaatgggaagagaaagcatacttattaagtgactttggtttttttatggacattgtacattttgcttcctctaactaaattcttagctctcttaagccactagtaagaagtacaaatatttacaatcaagagtatttactcagtcatggtgtcagtttaaaataacccaaatgaacaacaataggaaaatagttaaaggaaataatatgctatatccaggtaatggaatattatatagccatcaaaaatgatgtttataaaaaacaaaattttttttttaaacggagcctcaccgtgtcgcccaggctggagtgcagtggtgcaatcttcgctcactgcaacctccacctcccagatttgagcaattctccggcctcaccctcccaagtagctgggattacaggcacgccaccatgccctgctaatttttttgtatttttagtagagatggactttcaacatgttggccaggctgatctttaactcctgacctcaagtgatccacacgcctcagcctcccaaagtgctaggattacaggcatgaggtaaaaaacaattttttaagagataagatctcactctgtcacccaggctggagtgcaggagcaagatcatagctcactgtaacctcttaccctgggctcaagtaatcctcccactttggcttccaagtagctaggtctacaaggagtgtaccagcacaatggctatttaaaaaaatttttttagagatggagtctttctatgtttcccaggctggtctggaactcctggcctcaagtgatctcccctgcctcagcctcccaaagtgctgggattacaggcatgagccactgcacctggcctgaaaagtttttatatcattggaaagcaggagacacataatacatgaatctatctgggaacaaaactgtctatccctaataacctcagcaatatttatatgcccatatagacaagaatagaagaaatactgaaagaaaatatacctaatgtctgtgtgtggtagaaytgtaagtgggttttctatatttttgatattttctagattttctacaatgagtagtatctttataatcataaagatgaataaaagttttaaaaatagtttcaattctcawttcaacaataaagaattgatctttgctgaagtttgccctttgcccccaagtgaaccataactacttcattactcacacaataagaaaccagtgagaaccatgtctcattcattcattcacttcatttgtttgtaacctccacttcattccccaaaaaagaattctcactgtcttataagaatccagttataggacaagctggatttagtgggatgaaatcataaaatgcttttacttttctgatttgattgcctttcaaagcttccaacyagctctccctccctcaaccctggattatgctacattgagagatcctgtagttttccagtcactttcctagttaacacacaatctcattctcctatgctcttgaatatgaatgagtcttgcaaayttaaggctgtataaaaaaaaaaaaaagcaagttgtttaaaacagggatccccagcctttttagcatcagagaccagtttcatggaagacaatttttccacagactcggggtgtgggggtgggrgcagatggttttcagatgaaactgttccacatcagatcatcaggcattagattctcataaggagcgtgcaacctagatcccttacatgcacagttcacagtagggtttgcgctgctatgagaatctaatgccactgctgatctgacagcaggcagagctcaagctgtaatgcttgcttgcccgctgctcatctcctgctgtgcagcccagttcctaacaggccatgagccagtactggtctgcggcccaggggtggggacccctggtctaagactatctaccatgtgatactatttacataaagtttaaaaatacacaattctgtaacttgcttagtgatatatgcatatgttggaaaagtattaagaattttaaggaaaggagaaccccaaagtaccagtggtggtcctgtctggtgagggaagaatagagtatgtgctcttggaggaatacactagggcctcaaccacattgttgatgtttgattttttaaactgagagattggcacatgggtgtttgtcatgttgtacttctttatgtctttggatgtcttatatattacacagtgattttgtaacccagttaatctaaatcaaaattttaatatctcattcaatatatatcttcttcccttccttacgtttcacaacccaaccagtctcagagacttgtagtagtgaggaagatagagtttatcttttttcttccttttccctgcaactgggtgtctgcagaaaagaagtggacaggagaggagatgggaaaggatggggatagagggagcacagagtcttacttgatggggcagttgtaatctggccttggtgccctcacagagaccaatggagggtgcttttaggttttcttactagttactctctctaattttttccatctccccactgcacaattacctagcaaaatgcagtgtaccctctggtcaacctcttattcctcaccccctggggtcctgtcctcacaggccctttctgctagggtcgcctcatttggcaggcagacccttcaagacagctcaagccccacctctttgcacagtatcccctcctgactcacaggaaatagtcagcatgttgccctcccaactctgcaagcacaggacatatctactggaatcctctctccctttgccaccagggagctccagctagcctcaaatctttaggcaagagtcatgcaccagttcacgtgatctacagactgcccgggacacaggtcaatgtccccagggaattcacttactgccccctgcacttggggtgacttcatcctctcacagaaaggtgagctctcccacaattccccccagagaaatattcccaagctatctgctcagatccactttctctgcatgggctgaaagagagtgggagaccactgtgggcaaagcagttcaggtaacaccttgtgagggcctctctttagaaggtgtggtgcattgtcatctgtgggtctcagcaggagtttcagaatagggaaagtcccacttaacatcctgtaatgcaaataatactttacaacaaggtcccccaaaatgggctggtggcttcatgtcaaagcttgattcagtaaaaatcaattctacagaagaggtgaaaacaatgggcttcatgttgatcactaagggactggattgatccaagagtaatatttaaaagatcaagagggccagatgggccaagtttccccaggcagtcctcctccaccaatatctgtacaaaccacattaccctctactttccccttttggccatagctgccagaaaaactcaaacctacattcagtgcccagcttccataactaacgcgtcccatatgcctatttgtgtttgtatctgtcctatttatttttcagtttcaatttacaaaagtattattcatattatctggggaagtaggtggggataggaaccctacataaatattaacaagtaaagaatattggggctgggcgcggtggctcatgcctgtaatcccagcactttgagaggccgaggcaggtggatcgcctgaggtcaggagttcgagaccagcttggccaacatggcgaaaccccgtctctactaaaaatataaaaattagccaggcatagtggcgcgcgcctataatcccagctactagggaggctgaggcaggagaatcgcttgaacccaggaggcagaggttgcagtgagccaagatcgcaccactgcactccagcctgggcaacagagtgagactccacctaaaaaaaaaaaatggtaaaaagaatgaatttgtatggaatttaggctccttgctgtaaactatattatttctccttcagtctgaaaaatgtcatttacttgcaataggtcaagaaaagttttaaaaatgtggcagttcatggaccagtctgatattgagaccatgaggagcctgaaggatgctatggcccagcatgagtcctcttgtgagtacagaaaggtggtgacacgtgccctgcacatccctggctgtaaggtggttccattctgtggggtgtttctgaaggagctctgtgaagtgcttgacggcgcctccggtctcatgaagctttgcccgcggtacaattcccaagaagaaactttagaggtaaggcctttcagaatcatcgtggcctgaagagccactgttgctggctgtctcatcaggccctgtctgtgctcaccaaagaaatgatcactgattgaacacagggttaatagttgttatattatttctgggtagcacatagatccttggaagttctgtagaaaagaatgccaactagcgctgtgtgggacatagtattgtgaagttagttttaatgtattaggtttaatatgtaagtacaagtcaaaaagggtgttgttttctgatggtttttaaagattgacaggtttttcttattgggtgggaatgtctggatgcaggggatgaagacagtcaattgagagtattaagttttccacatcagtggaagaaaaaagaggggaagtcaacactgctttctgttcatcctttgtgggaaaatgctggggagcctggagacgcatgtagagacaagctccaggctcctgatcctcagagccttgtttctcccagatccattgcctcctgttcctgattcccagagcagaagggacagtgtgagctttgacccaaggcattgggcattggagagaaggggagttgagaaactggagggaaaagataaggaggctccctccaaggtgtttaaaaatgaaagaagtgactaaaatggaaagaactttatggagattttgagaagtcccttaccggggaccaaacccaaatctaggatcattcctgccatgatgacagaacctactactgacctttcacacacacacacacacacacacacacacacacacacacagagtcatgtacatgccttctccatggagtgggaagactctcctcaaccttcagcctcttctttgtcacctgggagcaaaggcatcacctgatatcagaaagacttaagagctcctgacaggtacaggcaacaccaccggcatctctctgggttatgagctaggataaaagggcaagaaatggaggagaaagcttaaaggaagactcccgggccacaccccctagcttcctcatgtcttaagaagagggaactccacatctcttatcccagacacagctctcacctctgatgagagaagcttcctaatcaactgtatgaacaataaggcttaaagagcttaaaaaccaggaagaagccactgtgttattatagaacacatgagcaataaagcaaaacatcacctcttctcagtgttttgcttgggcccagtcattttttctggttccatagaatagcatactttactcatggtttttctcagttctcactataaggataaaataaccatgctcttcctctgcaaattggctaatcttctccttagggagccctgaaataatattttttttgttttaaatttgaagtggagtgtcgattcccagagggattaaagttgtctcagtggaaacaagggtgagttttgatatttcatgtggtgaaatgaaaaaatgtttttcctggaggctcttgttttctttcccataaaataggcacaaatgccmttatttattactttatgatttcatttccctagccaagtatgttatccaggcatattaagttgcaatagcaaattctcgatttttttttgtagtttgtagcagattacagtggacaagataatttcttacaacgagtgggacaaaatggcttaaagaattcggagaaggagtccactgtcaacagcatctttcaggtcatccggagctgcaatcgaagtctggagacagacgaggaggacagccccagtgaaggaaacagctccaggaaaagctccttgaaggataaaagccgatggcagtaagttttacacgttaaaagtgaggaatgctcatctcttcttttttcctgttgatgagttgtttcctacttcagcttagtttcagatggacacctcatcaaaacctgccacttttatcattaagccacacttctttatcttcaaaccttaccaattccaaattcacatttacctttctcattttgctgctttgttctaaaattactgctcataatttaacttcttaccatctgttacccctttaaaaaaaaaacaaaaacctagagctatcctgccatttctaagaattcaacacattaaatttcagaaggagagctgtgatcttttatttcctagtttttgtaacagtggtttttttaattcttgggtggggtactagggtgggtattaagatatttttaaatcaaatctactgacttagttaggtctgggtgatacctagaaatcagtatttttatctctgccaacctctgggtgattctaagtcgagggttagtgatctcacttcgagaaacactgctctgtaaggtgtgttaaaattaaccctacacacacaaggcatctgcaggtttttaaattgctcagtaattccagtttctcagagattatttcaaagatttttcacttaacaggttgctaacattagtggcaatctatatatagagagaagaccatctgcaaataatcacctctgcacagaaagcctctcagagccatttaagttcttaatctccctctctctctctctcggcatctatgtatatatctatttcttccaacaaaagattttgtagatgcttttaagaataactatgaataattgaggatattaaagaaaagaaaaataagaatatgagaaaataaaacatacaaaaatgtatactatgtagtctatacagtgactaaattttgttctgagattcctagcagtcaaaggaaagaggaaatcacaattcattataagtttcacagtatttgtaagaaaaattaaacagatgtttgggagaagaatgccttctcctcatactggatctggctgaaattccttccttaaatcctactgttaaggctaggatacatcagataggaatagataaaataatgaatttcatatggctctttttaaagagccttcatctttaaagatgaagctttacaatgtggcttcatctggggctgtgtgtgtatgtcgtttgacctttctaaaacaccttcaggactgccacttttactgagtgtcagacccctagactatcctttcctttccctcgaagttccttcaagtggtaactttcttgcatcattttcacccgttatgaaatttttgtctctaattttctccacagtctcttgtctttttcctaatcattttatcacgtacatcctaagaacatttctcttccactgcccattttccaagccctgctgcaagcactcttagaagaggagaaaaacacaaaaatgcagatatttcttttataaaacctgtgaagtcatattgaaatcctcactttgaaacttgtgtacctaagtgccagtgatagcttctttacctcaagtgactgctactctgaaaggaacctcaacacacaagttaggttggtggggctgtttaatagaattcaccaaaaccagatcagtaagcactatttctgtggccatctgctgggacttgggaatccattcctgattgagagccccatgttttgtccagtgcagggttatgtgtgccaaagatgtgcagattgaaaagcccataggaactatgctttgttgatctggctgaaacagagactctacaaacagcaacctctagcccctgttcacttggcaacaaccagccctgtgaaaactacagcaaagaaagaagggacaatctcatggtcctttggtttaccccacctacagggtgctcttataattcttcccaaacctcacagctactcctgccagaaaaccactagaaacactcatagaaatctcaaaaagtgattataaaaagttcaagatttatttttgctgggcccggtggcttatgcctgtaatcccagccctttgggaggccaaggcaggtagatcacttgagtccaggaattcaagagcagcctgggcaacatggtgaaaccttgtctctacaacaacaacaaaaaacaaacttcaagatctcagcaggaagggaattgggttgaaaaaatcttgaaatgtcaatggggtcttcaagtaggcttgtctaacttctgtacagatgaagttgtgcctagcragctgaagtcgcttgtctgactaataaacagtagagccgggtcatgagcctgaccatgtgttcagtcacaggggaggatcctttgtcctaaaatgcttaaggcatttcttttgattgtagagagactaacccttagcctctttttatgtctaactcctgaagattaggaacatctgaattctgaaagcattccaattacatttcatatgaattataatgctcattaataattacttttttatttaccagcataaagaataaataaactatgcgtttgtatgtttaaaaacatatagaggcatggagacctaagagtagcatgtggcaccattgttgggaaatagaaatgaggagtatgaaggtgtgtagagaagagtatagagtcatataggagctgcaagttcttattgtcatcattttcaatattgttgaccctctttggcatgctgcaccttaagaaggatttgtacatttggaaaaataagatataagtagatgatgccagaaacctacaatggaagctgcttcagctgattaagaactcaaaccttccagtcacattgcctgggactgaattttgacaccacctcttactatttctgtcacctaggtaggtagctgaatcttactaagcctcagttttgtcatctgtaaactggaaatgacaatactacttgatagggtttttgtgaggwttataaattaagcaaattgcacggcatactataagtgccaatatagatggtggctatcgtgattaatgtgtgtatcacacccttaaaataccaagctgaagttctgagggtgatatggtttggctgtgcctccagccaaactctcatcttgatttgtaatccctataatccccacgtgtcaagggagagaccaggtggaggtaattgaatcacgggggcggtttctcccatgtgttctcacgatagtgagttctcatgagatctgatggctttataagtgtgtggttgttcctcctgcgttcattctttttcctgccaccttgtgaagaggatgcagcaaggcttcaccttctgcttccccttcaccgtccaccatgattgtaagtttcctgaggcctccccagccatgctgaactgtgagttaattaaacctctttcctttataattacccaaactcgggcagttctttataacagtgtgaaaatggactaatacaggaggttccagcacttaagtgtggacacccttggcagtaatcaccatttcagaggcaatcctcagtcatcctcctctcccttactgcaaagaggtattttctgtgtccttctacctcaataacctcgttagagacgcgcctggacgataatccaaccccatagggataggaaaaaaagaaagctaagcatgagaaagtagaatatctgagaaaagataatagttaccaggattaaccacacacacacacgtacgcatgtggatgccccaaatcataaaatgataggaaatcagttattctccacagggaaggatgcagacaggcctcaaccttatcaatgcccaacacacaacatcctttatctgcaacagctgcctcagcccagcccagaccttcatacagtctcactttctggctttgctggggatacctgggatcctgtatttctctctttctgcttctttggccaacacctgagacccaacatgatttgtaacagagaccattttcccactatctgcacaacattcaccttaggcttttttctcacttaaatctcaacttgaaacttggacaccatttttacagagaagctctatttgtatggatgtcttttgttttatgatactaacttaaactcaagccagacaacaataacattagcaatatttaagatgctaatgtttattgagagcctatctttaagcaaacactgctctaaattctttccatatattaaactatttaatcttcacaacagttccattttactctcatagctagcagggccaggatttaaattcaggcagactggttccaaaacccacaractactcacatataataagagaatgcttatagtcaaggaaggtgctaggttaattaaaagcaagaattttccagaagagagcattaaaaacgctagattttattagagagaacagctgtrgcaagtcctttggaaaggacatagatttacttctatcttaaaaaattaaatttacgcttgtttgtcacgtggtaattcatgttcaagggattatgttaaattggcaggaagcaaacgaacacttacaaagaaaatatttaaccaggttaacaaatacctgttgatcacccaatgtaaaattttcatcagggaacattagacaagtatttatctgtctacggtttctaactgaatgataccatggaagctctttaggaacaggataaaaacctttcttctatttttactccttggtcctctccttaaggcatacaacctgagtttgacaagatagtttctttgctggtaaaccacatctttgatcttcggttaacattatttagttcctaaataagtcttaacattccaccttatcccttcttgtaaacccacaggaaattatcttctaagagaatcaggcacaaaattgcataacattcactatatcatgtaagagacaaaagctactagtttcctgcttgaaatgaacttatttcattacaaacaattgtcaattttattttgagcattagtccctggaagattgctttttaatggaattattaccatctggcattagttcttttttgcattctaaaataaaaactgacgccaagaaagacagcgtcccctctctcccagcttacatcatctctgagcagcagaaacaggctccagaaaagccttataatttttctttccagacactatttttttataatgcttgtggtatttcactggaacatgcttgacttaactcagaacttaaatggaatatggaaaacaccatttatcttgctaaattaaaatcagaagttctatgtacaaatttacatgttgtattttaatgggtactaacactcaccaattgaatcctttttgctcttaaaacaacaagaagtaggacatggagaatgtggaaatggtcccaaaagaaagccccttggccgggcatggtggctcccccctgtaatcccagcactttgggaggccgaggcaggtggatcacaaggtcaggagttcaagaccagcctggccaagatggtgaaaccctgtctctactaaaaatacaaaaattagccgggtgtggtggcgggcacctgtaatcccaactactcaggaggctgaggcagaattgcctgaacctgggaggcggaggttgcagtgagctgagattgtgccactgcactccagcctgggcaacagagcaagactccrtctccagaaaaaaaaaaaaaaaaaagcccctctagaggaacagctgggctgggctgaggtagcctagagaagaggaagtgagaaaggaaaagtgcaaagaattggtcttcctatatttaatgagtgtactttaccaagacaggcgctgtgctaagtgctttccaactgttatcttatttgatcttcaccattattctatgagatgagcattgtctttttgccatctaatagtgaggctcagagaggttgagtgttttgatgaggtcacacaggaaacaggtggtgatgtttaacattaaacccaggatgactgcagcaggcatgtatgaagccattgtgtaagaggacataagtattggttttccagtgttaccgagagcaatttcagagggatggagctaaataagacacaaatgatttttttcttatttcactttttattatgaagtaacattaggaaaagagcataaaatatcatgtaaccccagatcttgtgttttttttgtttttgttgttttattttttatttttatttttttgagacagagtcttgttctgttgcccaggctggaatgcagtggcacaatgccagctcactgctcactacaagctcagcctcccaagttcaagcaattcttgtgactcagcgtcccaggtagctgggactacaggtgcctgccaccacgcccagctaatttttgtatttttagtagagacggggttttaccatgttcgccaggctggtcttgaactcctggcctcaagagattcacctgtcttggtctcccatagtgctgggattacagatgtgagccactgcgcatggcccagatcttggtttctaataccattcttcagtaaagggaggcaaggtttctcctagagaggctgattcgaggactggggcagaaaatacacaaggtgagcctggagcatgttgtagtaaggaagttctcaaaagaaacacacagtgatgggagctgtgaaaggaatacaagaaccaactggaagagctcccaatagccacagcaacaaaataaataaagtagtatcacattataaatcacccaaagtattaaattaatattcatgagctcatactgatacaagtaaatgatatgtgtaaatgataaataaacaaatgggggagaagagatccatcttttgtgcaaaagaattcccaataacttaggcagattcttcaccctcaaggaagtgcaacataactccccactccttaagagtgagttgggcatggtgactttttcccaaagagtagagtatggaaatgagttaaaaataataatagtagtaactgtacagtggcacatgacacacaggtcctcagccaggtgatcagtatcaccagagagaagtcatgttggtagtaggtgccctcaatatgatgtgataagaatgatactttacctctatggtcttccctccccaaacccataacctgcatctagttatggaaaaaatatcagccaagtcctaactgaggggccttcaagaaaacacctgagcagtactcctccaaactgtcaagagcacctaaaacaaggagagaccctcatagtcaagaggagcctaaagagacctgacaagtaaatgtaatgggagatcctggaagagaaaagggacattaaaaactaagaaaatctgaataaagtgtggaccttaattagtgataatgtgttaggatttgttcatgaattatgacacatataccagactaatgtaagatgttaatagggaaatttttgtgtgaggtacactgtctttggaattttctataaatctaaaactatcctaaaattaaaagtttatcgaaacagtgtatttgaataattatcaggtgactgagcataactagcatccagggttagaacattgccagcacccctaaacttcttatttcccttctgaattattaccagcctccccctagagaaaactactattataagttttacaataacatcttgtttttctttgtagtttttctactaatatgccttcctaaatagtacagtatagtttttgcctggttttgaaattgacatttacagaaatgtatgtatttatgtatcacaaatacataccatatgcattcttgtgtgtcttgcttaaaatttgtgttattccatgtagttagctattgcttattcattttcattgctgtacagaattacattgcatgaatacaccaaaatctatgcatacattttattgttgctggacttttggttatttctggtatggggctctgaaatggattttctcaccgtcagatttgtgagacactaaaattcaatatttgtggtagactttttttttaaagaatatccacgtgtggggcaaggatgtagaacctgctgtttgaaagcaagaatggtaatcttgttcagggaccatagtctaaactgaggagtatcaacaagccccatgatactgtcgttgcctcatcaagaggcagtaggtggcccaagtgtctcctgagcatgaragccttccttcccagagacgcgtggaccagcctatgtaccagctccttcacaattttactcaccactttgctggtgatgtctgtggaccaaatagcagaaaccttgatcttactaacaacttcctatgctttgaaaagaatgagactcttgggcaggttcctgccaaggtggccatgtaagaaagaagcaatcgcttgccttcactgttctctgatcctcttggctcaaataatccaggttcctgactcagcggagggaacgtgctaaattttctatgcaaactagccttttctgtgtatacctacacacatgcacagagagagtagaaatctaaggttgagtccaggagaactgttatgcttttctggccaccgtgaccatatttcccaaggagtgtcctttttaaatgtcatttatttttattttttgagacagggtcttgctctattgcccaggctggagttcaacgatgccatcacagctcactgcagactctacctcccaggctccagcaatcctcccacctcagcctcttaagtagctgggactataggcatgccaccatactcagctaatgtttgtattttttgtagagatgggatctcaccatgttgcccagcctggtctcaaacttctgggctcaagcagtctgcctactttctttccaaggagtatctttgaactaattgtattttatttttaacagtttaacagaggtacttctcaagccagcctattaagtccttttttaacctaaaaaggttaaaaaaacctaaaaaggactaaagtcccagtatattcagatcatgacttgtgtttatgatttaattgaaggcaaacaagcctaacaatgaaaatcccaggtataaagttagaccaaaatctcaccttggcttggcctcctctgagaggggttaccttgaacaaattactttccctttctgaacctcggtttcctcataggtagaaaaagaataataaaacttaccttgcaagtagattggatttagtacaaaaaatgtacataaagtatttaacacggttcctgacacaagaaggaaaactaatacataataaagattattgttgttgagaataaaaatacaataactcatctagtagttgttttcttatgcttatggtcagataccttgctaaagataagaatacagttataaagaatattagaatacggttataaaaagttactcaaaattttttttttgctctgtcgcctaggctggagtgcagtggcacgatcgcagctcactgcaagctccgcctcccgggttcaagcaattctcctgcctcagcctctcaagtagctgggactacaggcatatgccaccatgcctgactgatttttgtatttttagtagagagggggtttcaccatgttggccaggctggtcttgawctactggactcaagtggtccaccctcagcctcccaaagtgctgggattacaggcgtaagccaccacacctggcctcggttattagaagttactgtgtgctatttagtattttgtatttcctatgctaatttgaattcatagtgcgatgaaaaataaagcccagtgtcagtgaaaatgtctttgggttgttctcacttgattataagacaaaccaaattggtgtttctttccttaaggtttataattggagatttgttggattcagacaatgacatctttgagcaatccaaagaatacgactctcatggttcagaggactcacagaaggccttcgaccatgggacggagctcatcccttggtacgtgctgtccatccaagccgatgtgcaccagttcctgctgcagggggccacggtcatccactacgaccaggacacacacctctctgcccgctgcttcctccagcttcagcccgacaatagcaccttgacctgggtaaagcccacaactgcctccccagccagcagtaaagcaaaacttggtgtacttaataacacagctgagcctggaaaattcccactactgggtaatgctggattaastagcctgacggaaggggtcttggatctttttgcagtgaaggctgtatacatgggccaccctggcattgatatacacactgtgtgtgttcagaacaaactgggtagcatgttcctgtcagagactggtgtgacattgctctatgggcttcagaccacagacaacagattattgcacttcgtggcaccaaagcacacagctaaaatgctcttcagcggattattggaactcactagagctgtgagaaagatgaggaaattccctgaccaaagacagcagtggctgcggaaacagtacgtcagcctttatcaggtaaggggtgcagccatccctctttcctcactggcataatactcaagagcacacactgggtgaccagaccaccaggttcatgctcccagctctgacagttactacctgtggtgaccttgggcagcttttacttaacctcttggtaccccaatccccttttctataaaatggaaataataacacctgctcacagggtggctgtgagaattaattgaggctgtggctcacgcctgtaatcccagcactctgggaggccaagatgggtggatcacccaaggtcaggagtttgagaccggcctggccaacatggtgaaaccccgtctctactaaaaatacaaaaatttgctgggcatggtggcacatgcctgtaatcccagctactcagtaggctgaggcaggagaatcgctggaacccaggaggcagaggttgcagtgagccaagatcgtgccactgcattccagcctgggcaacagagcaagactctgtctcaggaaaaaaaaaaaaaaaaaaagttaatatgtgtaaagccacagtataattcataagtatgaagaatagtatctgcactcataggtggtcctatttgtattttgtatgaaatacattttacttagattttatagtaactgaaaatgcttatgttaactggtttctttgcagatgggagaactataatgaccctggtcgcggtttttattttgtattatatttatatattgtattatactacataaaaatagtcccaggatcattgtagttctcccatctgcaaagaaaccagttaatataagcattttcacttactcaggtttcaatggaaagcattgttatctgaatacttttattattagttagtgactagctgattcactgaaaactgtccctattgaaattaaaatcctggttcatttcctaacatgctatgtgacttttggagagttctttaacttactgcatattgctgcctaattgtagaggtgaggggttaatttctttaaggttgaaagaaatttttccaaatgtgggataattcttatgtggagttcttctttattaggtttgtagtggtggcagcccttagtgggcagtttttcacagtcagctgcttacattgagtgaattagtctttcattaaccctacgttatcaggtactctaacactatagtttagcgtggcaacagggctgggctgaatgagatagaagagacacaggcataaccagagtagcatcccttggggaaaagaggatacagattgcttggaaatcttaaactccacaagcaggtgacacttgaagtgtcattctcaaatgagttgtgtcaaagtattcagtttttctttgctatgcttttctatcttcatggcaaaaagaaatatcttttgtattgtcacagaacaaatagaactaccacttgaactactcaaatgcctgatttcatgtacttgtcacagttctaatacatttctgacaattaaaaacatttctcgccccaggaagttagacaaggcacatgtaatgccccttctttcttctttccctacacccatgtcmcgattatgagcagagaccatatcctgagtgactaacttgattaattgattaataagcagataggcctatgtacacaattatcctaatgttacacagaacaaagccagttttagttaactcgtctaaaatggaaaacaaatacctgactgtgtgtggcggcttatgcctgtaatcacagcactttgggaggctgmggcggtagatcacttgaggtcaggagttcgagaccagcctggccaacatggcaaaatcccgcctctactaaaaatacaaaaaattagtcatgcacctataatcccagctactcatgaggctgaggcaggagaatcgcttgagcctgggagatggaggttgcagtgagccaagataatgccactgcactccagcctgggtgacagagcaagactgtctcaaaaaaacaaacaaacaaacaaaaaatacccgcctcctgtgtactccacagggcacagggagctttcagtgtactcagctggaaaaaaaaaaaaaagtcttcaggagctattgtgaatgtcagtttttaattacagctattccttggccttctagaatcaggaaaattcatcaaatatggacatagaccagtgtttgagctcaattacaattcctgtcacaaagtctatgtggtttagttgttccatttgtctgcttctcaagcttatagcataggtaactgaattaatacataagaggtacttggtttctcatttaccctggcactcttcagcttttactgaaggaggcaccagctgagaccacgaacggcaggtgaagaggtaagagttgctgctagaacagagacagaagtgacttagagaagactcagtcctacccagctgcaaacacagctccaccctcccccaccacccctgcacagaaccaagatgttacagtgtagaggcaaaacagctcatactcaaccacttctgaaatataggtgatgttattccttgacactgctctctctacatgagccatttatgaagtcaggcaacgtgccttagaaacagacactcaagatttctttcgaaagaaaaaagttggaaagaccaatggactgatcattttctcatcatataaaccagttcccaaactgactcagggatcaccaaaaagatgctaacttagtactcagagaacaaaagatcaaatcttttgttaatgtttaatagctgtattggtgatttataatacctcttagaaaattaaattctctcagatgccctaaagttaaaaaaaaaaactatttaaatttacctataagctaaagaaatttgtgaaacaatgtttgggtttttccaaacttctgttaacagctctataagaggattttttaatccctagtttgggaagtgcttatatggaaaataatcattctgacattagaatttccttatgtagtaaatgtaagtgaagttactttcaaatactacaagtatttgagtactactgatggaagtagtaacaagagataacacagaagacaagaagaagtaataacatttgtagagaagcctagaaaaatacaggaaaatccaagaaagtaaactgcagagatgttgatgtggggtgtggaggaaagaccaatgtcttgagctttggcccaaggttatcatggacagaactgayggcccataatcctgggtatttggaaggtgctctgggaggctaagaaagttaaatatggaattaccaggtaaatatctttggttataagcaaaaaagattctggctatctttacgtgggggaaaaaaaaaagattcattcaaaggatgtagattagtttaatggtcttcaaaatgtcacatgcaaagatatgccaagaggtaacagtgcatggatattttttaaggaatctattttctaatcttcaactttcacataaactgttttctccactgcactccagcctgggcaagagtgcgagactctgtctcaaaaaaaaaaaaaaaaaaactgttttctaaaattgaacatgtgccttcacttacagtagtccatctcccacattaaaaaaagaaggtaggccaggtgcggtggctcagagctgtaatcccagcactttgggaggccgaagtgggtggatcacttgaggccaggggttcgagaccagcctggccaacatggtgaaactccatctctactaaaaatgcaaaaattagctgggtgtggtggtacgcacctgtaatcccagacacctgggaattgaggcaggagaatcagttgaaaccgggaggcggaggttgcagtgagccaagatcacaccactgcactccagcctgggcgacagagggagactccatctccaagaaaaaaaaaagagaagaaagtatatccttcatccatcccaaacaagtttattattttgtgtaaaacaaaagaaagattaaaactacattttacttcccagaaagcttcctttaaagactaaacaaaggtatccttccttttcctgacctaaacatatttctgttagtggtaaagtttgacccatgttgggatgttctgaaattagaaaaatcaaagcagtataggttaatggtgccaattattttacatgtaaactataatgggcctattaagcttttaaagatgtattggttaaaatccataaataaaagttttactcttctttcagattcagagtatgttattcaaaatggtagttaaaacgtatccattaggtttcattcatgaaatgtttattccaatttgaagtcactcctagtgacttgttagcagggattctcttcagcaggcctccagcagatggactgatctccaaccattttcattctctgtatcactgcattcaagaaccctgctccaggaaggggcttctgattggcttattgggatcatgtgccaatcattggtcaaaggaggatatttcatcttgattgacacacccatcgagactatatccagtggagaatagacagttaaagtaaaatcggggtatggttagagaagggagaaacagatcatggacagccataagtcacaatgtcccactataagaggtcaccmaaaggtttctttgtcaagtacccaagttattcagcatcctgggatccacagcaggatgcaggaagtgggaatgcacaagtcataacatcagatagttattaaacattaggctgaaggagcaagcacacacacacacaaagcttctttgttttttgcatatgatctgcaacaaagcaaaatctatccataagcatttctttggaactgcaaaggagagccagcctgaaatgtttttgaagagtaaacacagtacatggaaattaatttttaargagcccgcttatacagtgtatgaaatatcaatatcatctttagctcataggcaactttttgtggttttattaactgacttatggggagaatcattgacaattgtttaattaatagatccctgctgttacttacaggatgctacacagagttgccttagaagcagtagctactgtgaacaattgcctgccccttgagtgtgttgttgctgctcagagcatcctaatatgtatggtgttctgagtcccatgggctccctatctttagatttcagccactcaaggggatggcagcccaactattttaggagctccctggggcccttcaaagggaatttcatgcatgtcacacacaccctgtatttcaagtccgactgtcccaagcatcaaactagttgaaaacctacctggcaataatggacaaatacaacttgattttacttagattgataccctgcccctctcccttccaggatgtccaaggccctaatttgcaaagtaagtctaaatgaattttcctacagtggtagttctgcaatttaacctctgtaaatgggatgggaagtttttgttccccagttgatrtattaaagcatgtcactggaactcagcagkgatgtgaccaggacaacgggggacatgatgaaattcctgacagagaatcttgtgagttagaaaacagtcacttgggtggccagatcattattcttctgtggccgtctgtgctcttccacctcttggaattttctgggagacattaatatatttacttccccattgcttgatgcttcctattgtgttcaccatgtggctctttcacaggaggatggacggtatgaaggcccaactttggctcaygctgtggagttgtttggtggcagacggtggagtgctcgaaaccccagccccggaacatcagcaaagaatgctgagaagcccaatatgcagagaaacaataccctgggcataagcactaccaagaaaaagaagaaaatcctcatgagggtagagtgttatttgtttattaagcattaaacccatcttccmggaccgctgtatggtgaacatcaccataaaacacttaaggttgtttgggttgaggacaaagtcaggtataaaatagaagatacaagggcttaccacatacctccatggtgccatgctagtgccaggaacaccagggaaaagacaaggtccgcagaaggacatagacatgtaaacaaacacagtgygagctaaaaagagacatcgttgagtcacccacaaagtgctgtgggggcagagagaaggaaaatagagagctgaggggcaggcacagagggctccacagagcaactgacacgcaggtcttgaagaacgtgtaggattttaccaagcaaagaacataggagaaagtatccccagcagaggagacagcatagaggcataaaagacagcttgttcaaggaagcacatgctgttctggatggctagagcatgagcactctgtgggcaaggaagggctagaagagaacagagatcacagaggccccaaatactgtgtgtagaacacaatgtaaagtatattagcactgtgtattataaactatataatatgaaatatcactatgaagtgataatatatttgcttcatggctatttgtttgtttgtgttgctataaagaaatacttgaggctgggtaatttataaagaaagaagkttaattgactcacagttctgcaggtgtacaggaagcatggtgccagcatctgcttctggtgacagcctccggaagcttacagtcatggcagaaggtgaagcgggagccagcgcatgacatggcaagagcaggagtgagagagaaggggagaggtgccacacactttttttttctcttagaaacagggtcttgctctgtcacccaggctggagtgcagtggtgtgatcatggctcactgcagcttcaaactcctgggctcaagctgttctcctgcctcagcctgccaagtatctgggaccacaggtgtacaccaccatgcctggctaattttttttattttttatagagacagggtctcactatgttgcccaggctggtctcgaactccaggccttaagtaatcctattgtctcagcctcccaaagtgttgggattacaggcatgagccaccacacccagcctacacacttttaaataactagatcttgtgtgaagtcagagctagaactcactcatcaccaagggaatgatcctcagccattcatgagggatccacccccatgatccaaacacctcccactaggccccacctctaacactgggaattacatttcaacatgagatttgaaggggacaaacatccaaaccatatcatctatctagaaaaagtgccactctctttgcttatgggaggctttgatgctcatgtcaaattttatctgcttcacagtttttttctgtacacagaggttccggaggttctgtgccgcctcttgtctgcctccctcccctgaggagtactgctgtatagtaaagaacaactgaaataatatgacatgagaatactcggtcagccttaatgtaggtctttacyggttttaccaggaagaggcagtattgaaggtgggtaggtcagaaaatagagacctacctgaactaaagcagtgatgggagagaaatacaggcttggaaccatcgtgagctttgtgttcccaggktgagagtggagaggtaactgacgatgagatggcaacccgaaaggccaagatgcacaaagagtgtcgaagccggagtggttctgatcctcaagacattaatgaacaagaagaatcaggtaaagcggcatgtttacatctgagatttttgttttttaatttttgtgggaaaaaaagtatacatttggttttaaattgtgatttaagcattgcaaacatttctaayaaaactctttgtcctaaccagacaatgaaacctaaaggtacttctgcaagcatagtgtgcttggaataaaatccccattaattaacttgccattactgacagggagtattagatatacatggtataatttgatggattaaaccagtgattctcaaccttggctgcatattagagcttttaagaaaatctgattcctctggccacatctaagaataactgattcagatattctctggctgggaccttgggacctggacatcttatttatttttgaagcttcccagacagttctaacatgtagccagttgagaccccaccagattagcccattcataaagatattttggtgctgcttgtatagaaaccagctgcataggttgatttgctcagacatccagaagcctctmtggtttgtatttggttctgagggaaagtataatctgagtcattstctcttttctgtctttcatcctcacagaggtgaatgccatcgctaaccctccaaaccccctcccttccagaagagcccactctttgaccacagctgggtcccccaacttggctgccgggacgtcatctcccatcaggccagtgtcctcccctgtgctgtcttcttcaaacaagagcccatccaggtggggccttaacatgataaaacagaaggacccttcacattattccagttgtgtggaagggcatatctttacagttgtctatggaaagactatttcacattttgatgtatagttgaactgaaaactgaaaaatcccaaaattttaaatgatcctaattctcccaattttgtactcctaccttctcatattacttcaaaggtcagtagcagtaacaaaacctaagccatgattctccaaatctgtactatccagtacactagccactaactagatgtgggtatttaaattcaaatgtaaattaattaaaattaaagaaaatttaaaattcagttcctcagtcacagtagtgacatttcaagtgctccatagccacaagaagctgatggttattatcccaaagagtgtagatagagaacatttctttttatcattgcagaaagttctattggatagcactgctctaaacgaagaagagagaatagattgttttaatgtaaactatttggcccctttgctaatcgatgaaatatatttaatacttttctcatatgtaagttatgcatgtctagaggaatgaattcaagtatcacagcaagttggatatgtttaagtataaatctaaagctggataaattactttataagttccatgcaaattacatatttgaaacaatatcttccctctcagaagaaggaatgatattaaaatggcagacttccaaagggaaccagaatgctgctccatcctcctgtatcccacattaaagtttaagagatgtggaggttccagacagaaccaagctaaaacaggaactctttactttatctcacacacacacacacacacacacacacacacacacactctctctctctctctctctctctctctctctctctctctctccccacccctccctctctccccacgcccctctctctctttctccctttctctctctttctcttggaagcttcttattaasaatcctggctgggcacggtggctctcacatgtaatcctagcactttaggaggtcagggaaggaggatcacttgagcccccaggaattcgagaccagcctgagcaacagaaaccccatctctacaaaaagtaaaacaattagcgggtgtggtggttctcacctctggtcccagctactcaggaggctgaggtgtgagagtatcacttgagcctgggaggttccggctgcagtgagccataatcatgccattgcgctccagcctaggcaacagagtgagagcttgtctcaaaaaaaaaaaaaaaaaagaaagaaagaaagaaagaaaaagaaacagaaaatagaaagaaaaaagaatcctacagtaaattatcttttaaataaaaattctttcacaatgtgagcaatgaacttataatttatgctttatacattcacattctacaatgggtgagcatgggtcaaggttatatgggaattctttgtaccactcttgcaacttttatgtaaatttagattcataacaaaactaaaagttacaaaaatcagaatcctgtttattatactttcagcctgtgtagtatcctgggtaaacagcaaggaacctggattaaatggcatttcccgtttatttcaatcattcatgagcaggaaaagaaaggacgaagtaagggaggaaaatattttaaaaagagaaattaacatgccagatgcaagatcagaaggccaaccccaggaggacagggatcagcacccactcaagtgttttaaaacagaaagaaaacacaagacaggaggaaaaatcagcttgaatgctattaagggagaaagctagactgaatcctaagtctgatagtgggaagagtggacaaacagagtttcctagaatcaaagggagatgggttcctacagacagtagctggatctgcaaccagaaagaagcaagacaggaaatttacttctttagctgcaaatgatgaagtcacctttttcctcttcctgcacctctaccctatgtttcctgcactacactggggatcgacaacctacaacctatgactacaaaatgctaaaaagctatcaatttgtagtgctctttcattgctgaaggtgaccttcaaatgtcagcacaaattaattttccatgagtgaacattgttagcagggttgagagtcacttcaacaaactatatattttatatttatagtcttaaatatatagtttttagattatatatttaatatacataaaatagacytcatgatattctctatactttcttatatatttgaaatatttcaaaaaaaacttttaaaatccaagacaaaaaaaaacaggtcctctagaactagaaataccatttgacccagccatcccattactgggcatatacccaaaggattataaatcatgctgctataaagacacatgtacacgtatgtttattgcggcactattcacaatagcaaagacttggaaccaacccaaatgtccatcaatgatagactggattaagaaaatgtgacacatagacaccattggaatactatgcagccataaaaaggatgagcttcatgtcctttgtggggacatagatgaagctggaaaccatcattctcagcaaactatcgcaaggacagaaaaccaaacaccgcgtgttctcactcataggtaggaattgaacaatgagaacacttggacacagggcggggaatatcacacaccagggcctgttgtggggtggagggaggagggagggatagcattaggagatatacctaatgtaaaggacgagttaatgggtgcagcataccaacatggcacatgtatacatatgtaacaaacctgtacattgtgcacatgtaccctagaacttaaagtataatttaaaaaatagatcctgttcattaatttgactacaaaccataatcaaaacatctctcataccattgtgtcaggaaatcagtatagaaaataaaaaatgttgtgaaacagtaagtctgttctgagttgactgatatttctacattgaatagatgcagccttggaaggtgcaaatataatcctagtcaaagctggcttttttccattcttttttaaattttctaaaattagagacagtgcctcactatgttggccaggctggtttcgaacacctggggtcaagcaatcttcccacctcagccttccaaagtgctgagattataagcatgagccaccgcacccagccctttccattcttaacatttttccggttcacatttttcattaatatttaaaagctcttctctgttttcatctaaggactggttaagaaaggaatcagacaatacactcaaaggtttcttcttaaatgtaattctataacttagaatatagaaaagaacgtgcattatttcccatagattaagagtgagtaatttggggctctttttaatagacatcttcagaaacactgagttattttgcccattgatctgcaatttcaaagaactgatttgattaatagaggaatattaacctcagccctgggcccttattaaatagactagaaacatgttttctttttcacatagaacatgttttatttcctctgatacaatataggttaagagatgtgaaaagagagtactggaaaatagcttcaatcttaaataacttgcactcatccttttgctcatattgctaattggagcaagtctggtgggacagaatcacwacagtggcctgcccttgtgcccatgaaggccttgtctttgttgcagtgcttggagcagtagtagctggcacgggcggatcaaaggcggcatgaagggatttcagagcttcatggtttcagatagcaacatgagttttgttgaatttgttgagctgttcaaatcattcaggtacagtcttatgtttccttcttattctttctcaggcccccccatttctataaagatactcaatgagaggtgttttccattcctcattcagtgtcaggagccgcaaggacctgaaggatctgtttgatgtctatgcagtgccctgcaaccgatctggctccgagtcagccccactctacaccaacctgacaattgatgaaaacaccagcgatcttcagcctgacctaggtttgttgaacattttaggatttccctttgggatcaatctgtctaaaacttaaggtcagaggtccagtcacacaaactctgagcctgtcccacatagtgtgctattactgctgtgtagggaaagacttaagagaattttttttttttttttgagatgcagtctcactctgtagcccaggctggagtgcagtggtgcaatctcagctcactgctacctccacctcccgggttcaattgattctcctgcctcagcctcctgagtagctgggactactggcatgtgccaccatgcctggctaattttttgtatttttaatagagacaagggtttcaccatgttagccagaatggtctcgatctcctgacctcgtgatctgccacctcagcctcccaaagtgctgagtttacaggcatgagccacctcacctggccaacacttagagaattattttaaggtgtcatctggtgttgagggagcaggtgctactggcattttgagcaaagaaattcatcattgtgtggttctgcccatgtatttatttaaccaataaagccttccagtcattctgacaaccaaaaaccctttcccgactrtattagtccattttcatgctgctgatgaagacatacccaagactgggtaatttataaggaaaaagaggtttaaggggctcacagttccacctggctggggaggccttacaatcatggaagaagatgaaaggcgtgtctcacatggcagcagacaagagaacttgtgcaggaaaaactcccctttataaaaccatcagatctcatgagacttattcactatcatgagaacattttcacatgggaaagacctgcccccatgattcaactacctcccaccaggtcccttccacaacatggaattgtgggagctacaattcaagatgaaatttgggtggggacacagccaaaccatatcactgaccatttccaaatgtctgctaggtatgtggtgtgtgtcacagtggagaacccccagtctcttccctacctacagacagttgtgtgttcaatcacagggcagtagtctcctgccctttgacaaggagagtctttagcgccttccacagggtacttctgtctgaatgattgtccaggatatatttcctactgtataaacaagaatgtctcattcttctatctcactcaccaccaccaccattactatcaccacccaygcattttctaaccacttatgcatttccagcctatcattttcctcctctgttcttcctggaaactataaacacaaatagcaaaacaaaaaactttcctcttttatgcagttgcttcataattatttataagtttatgttgtccttgagctaagactattaagtattgttcaactttagtcataaaatctccataaccatggattagtcaagtagttacatttttcaaaaattattggactttattttttgttctattatattttattattttattatttatcatgattttcatgtattttttatttttgttttattttaaaatattattattttaaaataatgtaattttttgtagagacagggtcttgctctgttgaccaggctgctctcaaactcctagcctcaagcaatcctcctgcctcagcttcccaaagtgcagggatcttaggcatgagcctccatgcccagcttagactttatttttagagcaattttaggtttatggaaaaatgagtggaaagtacagagttccaatatactctcttctactctcccacacagactttcttctgttagtaatatctggcattagtgtagtacatttgttacaattgagttaatattgatatattatgatgaactgaagtccatagttaacgttaggattcactgtttgtgttgtgcattctatgggttttgacaaatgtgtaatgacatgtatccacctttacagtatcatacaggacagtttcactgccctgaaagttccttatgcttcatttttccatcccccccgcgacctccctccaaatccctggcagccactgctctttttattatctccatagttttgccttttccagaatgtcatatagttggaatcacacagtacatagcattttcagactggcgtctttcacttagcaatatgcatttaagtttccttcctccgtggctttttgcagcttggtagcccatttctttttaccctgggtaacattccattttgcggaggtactacagtttgtttatccattcacctactgaagtatatcttggttgcttccaagttttagcaattatgaataaagctgctataaacatttgtattcaggtttttgtgtgggcataagtttttccatcatttgggtaaatacctaagagtgcaattgctggatcatatggtaagcctatgtttagctccataagaaactgccagactgtcttccaaagtggctaaaattaaaatggccataccaaagttggtgcgaatgtgaagcaattggaacattgcaggtgggaatgtaaactggtacaaccactttggaagacagtgtggcagtttcttactaagctaaacatattccttccatgtgaccagcaattacagtacttggtatttacccaaatgagttgaaaaatttatattcacataaaaatctgtaaacaaatgcttatattaaacagtaaaactgtaattttaagggtatatcttcaatctctacaaacaaaaatgtgcaagtagttactccctaaaaccaaagcctgaatttcacctaagtccccagctgaacctacatttagttgccatgtaataccacatgggatatcaagatcatcaacctagctctgtcttcttttcctttttttttttttttttgagacagactctcactctgttgcccaggctagagtgcagtggcgtaatcttggctcactgcaaccgccgcctcctgggttcaagcaactcttatgcctcagcctcccgagtggctgggactacaggtgcacaccaccatgcctggctaatttttgtatttctagtagagacggggattcaccatgttggccaggctggtcttgagctccagacctcaggtggtccacctgcctcagcctcccaaagtgctaggattacagtcatgagccaccatgctcagcctttatttattcattgatttgttttttattcctatcactatgtgaagccagaaataaacacttctttgatggcttgtttaggtacattagtaaagagcttctccattttaataactccacaccattatctccaaaatgaactttgcaaaagatgctggctatcttgtccatgtactgtggtgattctgtttcagatctgttgaccagaaatgtctcggatttggggttgttcattaagagtaaacagcagctatcggacaaccagaggcagatatctgatgccattgctgctgcaagcattgtgacaaatggcactgggattgagagcacatctctgggcatttttggggtgggcatacttcagctcaacgatttcctcgtgaattgccaaggagaacactgcacttatgatgaaatcctcagcatcatccaggtttgtgcctgttttgtgtgtgcatgtgtgtgtgatgcctctggctattctaataatttgctgctaaatgtttattctttctatacttctttccaaagcctttaaatctgggacagatatacagttttgtttttttttttgtttttttgggtgtttttgagacagagtcttactctgtggccaggctggagtgcagtggtgtgatctcggctcactacaacctccgcctcccaggttcaaacgattctcctgcctcagcctcctgagtagctgggactacaggtgtgcgccaccacgcccagctaatttttgtgtttttagtagagatggggtttcaccatgttggccaggatggtctcaatctcttgacctcgtgatctgcccacctcggcctcccaaagtgctgggattacaggcgtgagccactgcgcccgaccttgttttgttttgtttttttaacaaaataccaagtatgttttttaacaaaataccaagtatgggctgggtgtggtggttcatgcctgtaatcccagcactctgggaggctgaggccggtggatcacctgagatcaggagttcaagaccagcctggccaacatggtgaaactgcatctccactaaaaatacaaaaattagccaggtgtggtggtgcgtgcctgtaatcccagctacctgggagagtggagcaggagaatcactggaacacgggaggcagagactgcagtgagctgagatcacaccactgcattccagcctcggcaacagagcaagaccccatctcaaaaaaaaaaaaaaaaagaaaaagaaaaatcagccaggcatggtggtccacgcttataatcccagctacctgggaggctgagacacgagaatcgcttgagcccaggagtcacagaggttgcagtgagctaagatcacaccaccgcacaccagtctgggtaacagagygaaaccctgtctcaaaaaaacaaacaaaaaacaagtatgtaagtgttcttctttaacatattattagtgtattattacataatatgtttttctttaacatattatatgttcttctttaacattattagtgtaataatattaacatattattagtgtattattacatattaatgtaggtcccaggctttctctaactcagtaactattataaggagttggtacataattttttgttgttattctagaacatgcaacagatttagtctaggttttcaacctcattagtcattaaatgaacatgcactagttcctactatgctggctcagttttaggaggtgggaatatagcagagaataagataaaagttctggtcctcaatgcagcttacattctagaaggtgaggcagacaacaaagatacgatgtaatttcaggtaataatggggtaggggaaaaactgagtcaagtaaaggaatggaatgatacaggaggtgggctgaggagagtaagcaaaggccacttggaagaggtggcatttggactgagccctaagtcaataaccagtttgatggtctcgggaaagagcattccccacagggagccacaaggtcaaagaccaagacagcagcaagctgggggtttatgaggaaccacaaaaagctggtgtactgtgagctgcacaagccaggcagagaatggcaggcatggtgtcagacagatgtgcaagggcccaatcatccgggccttttagagcttgataaggaggttggctttagtccatgtgaaatgggataccactgaaatttttgagcaggggagtaacatgatttgattttttttttttttttttttttttttttgagacagagtcttgctctgtcacccaggctggagggcagtggcgcgatctttgttcactgcaacctccgcctcccaggttcaagcaattctcctgcctcagcctcccaagtagctgggattacaggcacacagcaccatgcccagctaatttttgtatttttactagagatggggtttcaccatgttggccaggctggtctcgaactcctgacctcgtgatccacccacctcagcctcccaaagtgctaggattacaggcgtgagccaccgcgcctggctgatttattttttatgagattactctgagccacgcatggtggcacaaacctgtagtcccagctactcaggaagctgaggcagaaggattgcctgagcccagaagtttgaggccaggctgggcaatatagtaagaccctgtctctaaaacaaaattttaagtggttactctggccccattgtaaactgtgtgggtgaaggaacagatgcagagagactgcttaggaagctatcatagtaaccagcaatagctggtgaaggtttacactacagggtgtcagcagagaggagcggtgtggctccatgcaacaaatgagtctaggtttcaacctcccttatcacctgactgggtatcagtgtattagttgtccagcagttggatttgatcaccgaaaatgctaaaattgtgagattactatcacactgttgagtgctcattatgattttactaaatacaggcatggcactaagtgctctatgtgaatcatctcagttcacctctcaccaactttatggtagctgctattattatccccattttcacctggataaactgatacactttgttttcatagaaatcagccttcttttctcattctcttcttttttctattaaataaatatgcttagtataataaactcacatataataaatgttttcttttggactaaaaactacttcttaccactacgttactaaattagttcaaatatttggtttagatgtttcctgatgaaaacagaacagctttaaaaaatgatgtggtggtttctttccccctcttagtttccttaacctaaataacacttttttttttaatcccttgcagaagttcgagcctagcatcagtatgtgtcatcagggactaatgtcatttgaagggtttgccaggtaacttttaaaatatcttttgcccmtcttttaagagtagatgcatttttcccatgcagtcttaagaaaatttgtttcacctaggtttctgatggataaagaaaattttgcctcaaaaaatgatgagtcacaggagaacattaaagaactgcagctacccctctcatactattacatcgaatcttcgcacaatacctacctcacgggccatcagctcaaaggagaatcctcrgtagaactctacagccaggtacagggaatgccacttggaatgtggtttttattaaacctaattatttatgtaacccccaaagtcaaaaaaacctgaccccagactcctttgaagagcttatagagtaagctattacatgtcaaatgtgaggaaccatgatgtgtgggaaaactggctatactacagcagtcgttttctttacttcttttgttttgttttcccccatctatacttaacctttattctgggccaaaatgaaagtgtttgtttgagactcatagcttttagatcctagttagtctgacctactcccactaaaattagattttcccatgggaaaattatctaatcgtttctctaactgctaaataatatattgtagtgggaaagcatagtagaaaatgcaacttcctatgtacttattcccaaaatattgtttgttttgcttttcagtttgttaaataatcaatctatccctatggtaaccaaaaaaaatgcagaaaaaaatctacacagactttaggcactgtccctacacattaaattcatcagaatgttctttgaaactcagtaggttctctagactagaaaaagtacatccttttgacctaaacatccaacttgcaatgatctgcgtgtccattgcctctctgctggatggtctgcagcttcctcatctattctgccttttttcttaactctttcaagaagggtcaattcggttggagccaggcagggaatataagtgtgtcattgtgtgcacacgtgggtccaggtttgaaaactacaggtgtattgtttacataaccccagcaccagtgaggtttctttgttctccagattagtccagatattcctcaaagcatggggcaattttttgtcccaaagcttgcttagcgggaatatgtattttaaactctattttctaaggaaactttattatgaatgaagatgtgttcttagagcagtgattttcaaaatagaagttctgtcatggggcctcagccccccacactgagatgaggaagccagagagtaggaggggtgccatacgctgccccatttcaggtaatgtactactcctctacacactacatactggccctcccttcgcacacagaatgccaaagttaaaagaagtttgaaatccattattctataggaatgaaattaaatatacatataaatacagatacttatatatatttcatatacacatttgtaggtacacacatatacatgcgtgtacatatatgtgtaagtgcatatatacatatctatgtatatttatgtacttgtgtgtatccacatttatcccagggaaataaacaaggaccagtgtcctggctttaatttctatttcattcctctgtttgacttcaaacagtttttaaacctcttaatatcacaccccaaggagagactctcacagcttttgaataaggcacaagaacccctcaaatagactcagagatgtgactaaacctagtgtgcaggtggatccctcttacttcatttctaacccctctccactcttccttagcccttcctaattacctcttaacattactccatggggcaaatgggaagtgagaataagccctgttcttctcatctagaatttccagcccaggttttcctcttctagccatatgtggatatctaaggttacacagactttggtgaagacctttagtccttcaatgctgaaaagccatctcatctgttgccagttgctgaacattattcctggtctggcaggggcaccacagagataagcagcttggtgttccagccaccattttacatagcaatttccagcccaaggcactgcacctctagatactctagctgctgaaagaagcagatagccttgagattctaggccactgactatgctgtaaaataggaagaatatagcacttatcccatataaaagtgttaaaatgagaatcattccactatctgagcttagttgcagaaactctagtggccactaagccccagtaatggattgctgtcacacagaaatagttatgtgcattctaaaatcagtgggtaggcacatttacagatgtatcaatttcttggcttgggtcactattccagtatgtaataattttttaagatgatgtacagatctatggaggaagaggttgcttcaagcaaactttatagagttgcaacccaagcacatgtattgagctctgcttcccacttcagatccaggataacaaataggtatcagctcatctgattctttggtagtgttttctggagcactttaataaagaggttatgagctaacatattaaagcttaaaggacaagtgtgcctagcttgattactgatgtctgctgtgggtatgggagaaaggaaccatttatggattatttgccatccctgctctagttgctattctggaattagatagccaggcaaatccttgataactctgcttccactcttcttacatgttatgcattcacagcaaagatgtttaatcgtggcttaatttgggtcttaatggaagtgattttatcctgattggcttgctgtaaatgtttagccagttcattaaggactcagtggccttattttctctgggctgtggcatcagcattttcacctccattgatgtctacccagatagagagcacttgcctggctctctaatttgaagacgtgccctttcaaggggccaaagttgctaggaaaatggccatatggttttgctatcaaattttactttcctttaatatccagctctggtaaacactctttctaccttaatctgttcccttccttccccactctggattaattgtggcctttggcaaaaatgccatgtttgttttagaccatttgcccttctgctttagtcctgagtgtaaacactgcctgatatgtagaactacatgctgggtttagttcgaggctttatctccaggtgctcacctggggtggattcgctcattgatcacacaggtccttttgcaaggctgtcgaagtgtagaattggactgctgggacggagacgatgggatgcccatcatttatcatggacatacgctgacaaccaagatccccttcaaggtaatccttcataactttctttaaatcaaatcacaaagagacattatcttcatttgtctttttttttttttttttttttttttgagacgggttctcgctctgttatccaggctggagtagagtggtaccatcttggctcactgcaacctctgcctccgaggttcaagagattctcctacatcagcctcccaagtagctaggattacaagcccawaccatcaagcccasccaatttttgtatttccagtagagatggggtttcaccacgttggccaggctggtctcaaactcctgacctcaagtgctccgcccgcccctcagcctcccaaagtaccgggattacagacgtgagccaccgtgcctggccttcattcttyatttaaatcagtgacttgaccaaattacaccttagatcaagggtctttatgctgggtctaaatgaagacttcccaaaagtgtttgctgtatcatgtggaatgtgcacatgttcatttttctggagttaatctagaactctcattagattccccattcaacccaagttagtaaccattaccttacattagttagcatgtaataatattgttgcaatttttacgtaatatgatatataaaggcaaggtctattttcctgctataggaattaatggtcatttgtcctagtgtcatgctgacaaaggccaatgtcaggagttaggagatggttaaatagttagcattataatgtaatgagcatcagttccacctaagaagattggtcacccaggaagactgatctcactggatttgtgtttcaaattctgggtagcttattagttgagttatgcaattactaccttcattcagagggtcttaggctatataacataatttttctctgaactgtggccaggttgtgaaggaatattatttttattttacatgtagaaatagtggctaaaatgcattttctcctcaacttggtttcctatttagcattcctaaaactcctgtatgctatattggcatgggcatgagttgataactgtgtttacayatacacataaatatatgtgacatatgtcttattgcctcaaataaattataaactctttataagcaagaaagtattttatgcttaattatgtttgctgctataactaggacagtgtcttttacctgcaatatactctatatatgtatacagagagagtatatgtatataaatagatttgttaaattcaatatgatagttgttccttatagtatgtgaacaatactcactataaagtttaatgtctttctrcaaaatggccttatcctcatgcttcatttgaaaatacgaaaaccatctttggccagagtctgctgcatgtaacaattgagatgctttctgtggctataactaccctgccttctgaccaccttgacagatatctggactctaatgagctgttttggctctcataggaagtggttgaagccattgatcgcagtgccttcatcaactctgacctgccaatcatcatatcgattgagaaccactgttcattgcctcagcaacgaaaaatggcagaaattttcaaggtgagctctcaacaaaaaggcaggatggtatgttggcccttgttttgcaattgtcattgggttgttttgttttgttttgttttttgagacagagtctckctctctcacccaggctggagtgcagtggtgcagtcttggctcactgcaacctctgcctctgaggttcaagcgattgtcctgcctcagcctcccgagtagctgggattaccagcatgcgcccccatgcctggctaatttttgtatttttagtagagatgaggtttcgccatgatggccaggctgctctggaactcctggcttcaagtgatccacccatctcggcctcccaaagtrctgggattataggcgtgagacactgcacccagccgtcattaggtttaaatgaggcctttgtggactatgctgcaattagaccttggctgtgaagcatatacagttagggtcccacaaacctgagaaattgggctgttcttagagcctgggccctctctgggatggtccctattttcagctggagtgatataagtattgctctctggtctccttaccctttccagaaagccttaggagattaggatagaccaactctccaacacttctggtaccacaagtcagggatgccaggatgtcatctgtcagttgtatgtggaaaagctgaaaatatctcagggcaagtaagtcaaatcttataggagaagatcatcttttttttttttttttttttttttttgcgatggagtctcgctctgtcacccaggctggagtgcagtggtgcaatctctgctcactgcaagctctgcctcccaggttcacaccattctcctgcctcagcctcctgagtagctgggactacaggcgcccaccaccacgtctggctaattttttgtatttttagtagagatggggtttcaccatgttagccaggatggtctcgaactcctgacctcatgatccacccacctcagcctcccagagtgctgggattacatacgtgaggcaccgcacccagccaagaagatcttcttataccacagtacaaagatccaagttagcaaagagcttagactggccagaacagttgctgtgttaacagtcagtccttccttatataagggtatgataatgtatcaggggaacctgcccccaatgtttcaacgtaggttctttctattttccctaagtgtcagccagtctgagatataaagagaaagaatacaaagagaggaattttacagctgggctgctgggggcgacatcacatattgataggtccatgatgcccacctgagccgcaaacccagcaagttttattaaggatttcaaaaggggtttacaaacagggagtaggtcacatgcttcaagggacaaaaggcagagcaaggatcacatgcttctgaggaaacaggaccagggcaaaatcagaaactcctgataagggtctacgttcagcggtgtacgtattgtcttgataaacatattaacagaaaacagggttcaagagcagagaaccggtctgacctcaaatttaccagggctggggtttcccaatcctagtaagcctgaaggtactgcaggagaccagggcatgtctcagtccttatctcaactgcataggacagacattcccagagcagctgtttatagacctccccccaggaatgcaattcttttcctagggtcttaatattatattccttgctaggaaaagaatttagcaatatctctcctacttgcacgtctgtttataggctctctgcaacaagaaaaatatggctctttttgcctgaccctgcaggcggtcacaccttgtggttgtcttcccttgttccctaaaatcgctgttattctgttcattttcaaggtgcactgatttcatattgtccaaacacacatgttttacaatcaatttgtacaatagtggtcctgaggtgacgtacattttcagcttacaaagataacaggattaagagattgaagtaaagacaggcataagaaattaaaaagtatgaattttgggaacgataaacgtccgtgaaatcttcacaatttatgttcctctgccacggctccagctggtccctccgttcgggatccctgacttcccacaacaataatgcacccagatttagaagcagatattccattatacttcccccttcctttaatggtagaggcatttgtggaaatgaggctctcagtgggaaagaggggcactgacaaaatgtccccaaatattaatgccaacaaaactaattaacttttcatattgtcctggcctaagctttgattttttttttcaattaaaaaataactcaaggccaggcccagtggctcacacctgtaatcctagcactttgggaggctgaggcgggtggatcgcttgagctcaggagttcgagaccagcctgggcaacaatggagttgatataagcattgtgtctgctttccctccacccacctccttgacagacacacattctgctttggagatccatgctcaaaatctttgtgagaattgtgtctgtggttctttacactatgtggacgcaaattctacctatgtctttgtccctactccctaccccctccaaagttttatccttttgacttgacttcatctgaaactaaccttattctacaaacaacagcctctaactgattctctgttttcttatttaatacatcagaccacagaatattttcctaaatagttagaactgacaccagctgcagagtggcctcgacctctcctcctgtccttctaaacacctcccttcctttcagtaagaaactgtgaagggggcaggagcaggggacagcttctttcctagttcctcttcctaagactttttaaataattcaaccagtctaaaatatctactatrtttatgaagtgtacatatatttatcaattatagataaaaggcattgattgtatgttttccttcattctttttagactgtgtttggagaaaagctggtgactaaattcttatttgagactgatttctcagatgatccaatgcttccttcacctgaccaactcagaaagaaagttcttcttaaaaacaagaagctaaaagcccatcagacgccagtggatatcttaaagcaaaaggtactcccctctgttaaaccagttatgaaaaggcagtgtgcctagaacaaagaaaaataacatcattctaacctttcagatgacctgctggtttactagtttttcaagactgactttccttaaatgataagtttgattttgggcttttcattccatagaccaataaattctctcatctcactcacccaagatttaatttgtggaatagttcccacatagaatatacctccgttatttaatttattctgagtgggatgaagtgtgactgttgtgtctgaaactgagcttmgggggttgttcatcccataatggctgctatagtcccctttagggagagtccccttaggggagcccttggcatggggcctgtagtagaagcccaaaagccatagccctgtgatcccagcgtatcactagtttatgctgcttgggcccagatccggacaacagagatctgggcccaagcacgacaaacccacctgtgtaggagaccctcggctcaaaggtctgtgaaaaagttcaggtacagaacactgagtccattttccagtctgcacctacttatcccacaggatgacagctgacaaaactatttgtcctacttaggagggcactgttggtcctaaaacatcactttggaaactagccagctacagacttgctctcaggctggctcaaagagtacaggcacacagatgctaaacatacagaaaccagtttctttacaaacatccgaacctgcatattcccttgaagtgtttgtgtcctctgaaggtaatacattacccaatttgaagatcacccatgattctgggccaaaagttgcaaaatcagccactttcaggggctaagcaggaaacatcagtgtgaggagccagctggatacaggacagctggaagtggtgaggacaggagtggagtgtgcacgccgtgtcaaagaacagctctaattcaattatttttaaacactgcaccagccaaacaagtcaggtctggaggtgcagtcagccccaagggccaccagttggagacctccagtaggtctacctttatccagatctgcacttccaaatctgctccaggtgaccttgcttttgcttgggtttcagaggccatggcacctatgctgatgggccttgttacaaagttatttaaatgttagcatgtatactctaccttgccttcctcaaatgccacatcagtgactgaccacccagtgtggtgctttttcttctagagccctgttcatctgtgctgttttctttatccaacaattcctgcccagtcctcactgccaagcagataaagctgctaaccacacataccactgtggtcttcaagataaatgataaatgtgaatgtccttgccttttccattctgtgcacagtcatttgcagttacttataaggccttcattccactaatgaacagaagtcttttttatgttgagcccaaatcttccttccttttcctccttctcattggccctccctcttccctctgcagctgtacagactaattttatatttagaaagctatcatgtgtttccccaccagcttttcttctccaagctaaaaattcttgttgtgccaactgttcctgacaggatatggttgctaagactctttacttaccattaagaatatcgtagatattcttaaatttgtggatattcttgaattcgtcaatctgaaaatgtgatttccagaactaaatcagtattctaggtagtatattacagcacaagaacagtgaaaccatcacctcccctaatttgaactttaaacctttgttaatacagcctcagactgtctgcttttcaaaaattcttggccagccgctgtggctcacgcctgtaatcccagcactttgggaggccgaggcaggtcgattgcttgaatctaggagttcaagacaagcctgggcaacatatcaaatccccatctctacacaaaatataaaaattagctgggcatggtggcatgtgcctgtattcccagctactggagaggctgaggcaggaggatcacctgagcctgggaggccaaggctgcaatgagccatgttgtgccactgcataccagtctgggccatagagtaagaccctgactcaaaaaaaaaaaaaattctttagcacacactgagctcatgttgagcttgtagaaaacaaaaagcattcagttattttcatatagactgttcttatgcccagcgttcccatttttccagattaacaatgaattttaaccttttgtatatgggagcctcacatttatctctatttctgctcttcttggttttggtatattattacrtcctacaaagttctttgtgaattttgtttctgtcatctggtacatttattagcagtttctcaaactgtgtcttcatcccaagttgcccttgagtcagccagccacatggagaggcctgtgcccttcttaaataagccccctggcatttgatgattattgcccccgtctggtgctctcctctcttgtagcctgcatttcccagagtgtgcttcgacttctttattgatttctttatttataaaatagaaaactgaaacctggccacttgtgtgactttctcaaggccacccagctcatagcaatagagcttagtctcagacttgggtctttagagaagcccttttcaaaggtgatacagaagtcagagtacattaataagaataatcgctggagcactttgaaaaacagattctaaggtcacaaatctgactgactaagtcagaatttccagaagaaaggcctggtcatctgtttatataaaaataattccttaagtcaccatggtgtctgcgtaaaaaataataacaataataattcttattatcctggaagtttgagaaacactatttatctgctgtttttcccataaagtgaattatcttatccaaaacagctaaggaggtcactgtgtggtaaacttgttcttagtagatccactctaactcttgcaaatcacctctttattttctaagttctcacaaaccaagtgattaataccccatcatgaaattttgtcagctatcaccttgacactgcccacagtataatttccacaacttacttgttccttattttggaaaaatgggacaatataatccctattgccagttttctaagactgcttgcaacctttcatgatgacttcccaaggggtaccagcaatgattccacagtcacatccrtaaggcctttctgttttctggtagatcatgggtctagacctagtgatgatctgacctcaaataaaccaggtgatccagagctccagtgggctcagacctacccgctaacatagaaggccggagtcatttcccatacaaagaactcaccctcagcaaggatggattgactcagagcaggatttctgaagccctccacctgcctctggcttgtactgagatgcatcctgaggtctcctaactataccccaccaggatcctccaggattctgacattcctctcctgaatttgaacccaaaaaactcagttcaccttaaatgacagacactgcggctaggtactggggaaacagagaagtgtaagacattgctcctgcttagccctatgagggccagtctcctcatctgacccatacctccaaccacaacctatatccgagttacttttattcaggggctgaggtcccatttttctaccctagaataagtaggatattgcatagaagggtcccagctgttggccgtttgttgggctacctctcccatgcttctccttgagcatcttgggggccttggcactccactttcagacactgctattcgtggttctttgagcagtgtccttctcccatacagttctcatgcttccctgccagtggggtctgtccagcccttggcgtcatcattcccagcacttggcattaccttgagtgctcgctgagtcaaggcccttctcttatcagcgataaacagacctgcttttgtggctcacttgtgcctacaacagatttcccaaagttttgaagaacactaatcctatgagagactctgagaagagaaagacaggggaaaaaaatttcctggttaagtaagcatgggaaatgctgcactggagatctttgaagactcgtgatgccctttagcgtattaaatgaaggctgtgtgaaaccctgtagtaggaatgtgttcaggtttggttaagctgctgcttccaggcattcagtgtatcttgtggttcctgtaattgtcagtttttccataacacctattaacacccaccgagctccataaaacccactttgagaaatcgcagcctagaccatgtccagttatctggaatggactgctttgtaatacatttcatctggatatggacacagcctaaattgtatcttccttatgtatacatattcattataaaggtaatataaccacatttcaaaaatttagggaatagagaattattttaaaacatacataattccagggtcaaacacaactgtattacacgagttcttaaccttggtaatatccacaaatagaatttagggagtctacgaatataaatgraaaaaaattacatctttattttcactaacctctagctgaaatttagcatttcctctgatcataaatgtagggaataaactacagtaatataggcaatacctattgtcatcaatagaaatggcaactttttcattatacttcacagttgtcgctaatatctccaagaattatttatgctcaatttatmttttcaaaaatgttaattaacttactactatgttttctactgtgttaataaacacatatattctaatagcacaaatttgttcctataacatgtgatcactgtattcaacagtatttcctttgtaaccatttcattttatgcatttaaaacatcattctgagaagggatcctrtctcaccagacaaccagagaagtctgtgatgcaaaaacaagtgaagaacccctgccatattaacatttaatatctaggacttcgtgactgtcattttatataattgcactttaaatatataaaacaaatacagaattatatgtatatttatatagtgtatatatttacatgtatagctattatctgtatgcacacacatacattatatatagtatatattagcacacatgtatgcacacatacacatgcagaattatatatgtgtgtatatataatctatatartatattcaatgcataaatattgaataaaagaatttgttcacttcctttgttcaataaatatatatcaattattttttcatatctcattctctccagcagacaaccattgcttactgaccccgttcctctaccccgtttagattgtttcctgcatttagttcatgcaagtaacgtttcctatatttcagatgattttcttaagctaggtaggttcccagacctgtactgatgcttatcacttcacagtaattccagtaaacacggagtatgtgacctccctggctgcacacatcaagtttcctaaagtttctaggcctgttttgttaatctgatttatggttcagaaagccgtttgaaaacaattttatttaaaccaacaacaattcttttggcctctttgtccatagggattctaatattgttctcaaggtcaggagcctgtagatattattttaagaaggggaaaaaatggtttcttaacagagacatacttctgaaaaattgatgggtgattcacttcttcagtcacttgggattgatgctggttctccaaatcaccaaagctttctcttggaggggttgtcctgggaacctggctagctgggcactgcacacagtcttctggagattgtttataaaagctccaggattcttcctgtaggaatgctaacgttcacccaagtgttgacattgcatttcgagggaatctagatttttttctcctctcccaaatgtatcaaaataggttaagccacttttaacgattgtgttaaacatcaggggtagttttaaaggttataaatgaattcattaacttggcatctgcagtttacaattattgctattttacaggctcatcagttagcatctatgcaagtgcaggcttataatggtgggaatgccaacccccsacctgccartaatgaggaagaggaagatgaggaggacgaatatgattatgactatgaatccctttctgatggtaagagaaacagatccctatgctgtgcacaggaaaattytyggatgatttgccacatttttctttctaaaataagtctagagcgccaaagaccagtaatacggatggttgtaatattgtccaggagtttctgaattcagtcacttagcaaggaccgaggaaggaggggattctgttagccaacacttacagaaagaagaggcaggtgtgggaagttacagggagtcattcctacgacaagtttctagaggaagagatggaattgcagcagagaaaccctgttttcaccctttagtttctagcgtggctgataatcttggcaggagtcgtagactgaggttgcgtcctttctcctgcaccaccggcagggggcagcatcacggctctgtgctctctgtttcacactcttgctctggcattctagtagtgaaaagaaaggagaggagcctcatttcccctccctccctggttttcataccactaagccaacaagatctttccttctggccccaccaaagagaaaaaacataggcaatgctaatgacgcaacacaaaaagtcacacgaatgatgttaactacagattactagcgaaggattcttctcacatgagaattaggttttcagtgtgtttcatttgcattaaacatttgttagagattgcagaatgtttactcaggtacctttgctgatagtagactgtttcattttggtgatgtctgaaagrcaacaatataataataagaaaatgccaaggttcctatttctataaacattatatagtagaatatattctttctatgtagaataattgttttgctaaatatgcagatatgcccagaccagaaaccatttaccattaagttgtctcatgcattaagacaactgagccccctcctccaaatatctgctcctcagcagaaatttgagttgtctccagtcatagttcagttttgtgagcctccatcactggttatactgcaaatataataccaaactgtctgcccccaaatataataccaaactacatcatttagtatttgtccttagtaatagttgattgctccataccaccaattaaaagccagtttgctacacctgaaaccccatgagctaatatgagagacatatctcatcagatagtaagaggggaaaaaattaaaaggagtcaagacaatttctctgcaaagtcatgggaatgtgaattttttatattaacttattcttccccatggttttcttccccattacagttgcagtaatgccccatagaactaattgattcagatatgaaataaaaatcacacctaagaaatcaactaatctagatgtcatatgcccctataagtagttagtccactagaaaacaaatttgctctttcataaattactcctgtgctttttctgtacttctgagaataagaaaggaaaagcctttttagaaattattattatactgtagatttcacataaagaaataacaaaaaattattatagatggttttgatttgcaagtaacaaaatgaacaggtgggagaaggattttctgatttattttcatttgggaaatttagtcctataccactgaatttctaagatagttgcatgtatttttaacaatccacatatgcagaggtggagtatcattggaaaaggggaccacaccaggctctgttccagtagactgtgatacctggggcaatgtcttcaccaccttaggccttagatgcctcagatatgtaatcaaaagttctgcgaagtgtttggtgatgttcttcctctacttccagcactaagatctgtaatgtatgaccacttaagcccactaccactacatgagtatttcccccttcattgaaagatcgctctgactggatgattctcaaacaggccttgtagttatgctgtgacttgttgaagcttgtccagttaaggcttccgtatgtgactattagatgccttactaaccacatgcctttgattattgttgtgaccatctccactttctccagcagggatagagaacagaaatctacctgctgtgggaagcaccgttaccagcctcttagggggcctaaaaggtttcctagcttctcgtaataatgggtctttttgagaatcagatgaaagctatcacctctgaaaaataaaacgtgctctcaaaattctgcacaactgcaagagtttcacaagtttcctgagaccctcataggcatcctagattaggaacccatctctaaagtcagggtgcccggtttatctctgtgatctctcatccttggttttcatgcccattaaataaaggaattaatctaacaccatttgggctataaaaatgagataatgcctagccacagaattattgcaagaaaacgctaaggaagttgcaaatgagagttatttatctgagaaattgtaactctgccttttgggtaataaattcttaatatttttctcccaaccttgttgtttaccttgtgtctagttttgaacatacactgcagacaaatttgaatttacaacttaacgcagacatattctatgacaatgacagcacaattccaagaaattaatctgtttctgtacatttgaaatgaagtcatattgggagtattacagcagtcagtaactgaaaatatgtaacatgaatgtgtcagcccttggcatgattcacattaataatgtttacatttcgtttactgctagtccttgcattgttccacagtcaaaatattaaatctatagagcatttcctgtttcatttatttataatctaagctgctgttatttgtgctttgcttcatgcctttgtttaatttatctggtgtttgtcttaattttctccttcctttacccctttctgattctgtttttctgtagcagatgtccttactgcctcccctgctcctaacggtcaggaaggtaaatgccatttgaacggggcattttaactgcatggatgtcagcattctgtttccaatttcttgggcccggttagcatgacgttgtgatacttctgtgaatacaaatgtaatgaaatgatttatctcatttacttcttgtcagcctgcatggccctgatttggtataaggtccttttggtctaatcgtttgtgctctgatgatgcgatactaaatcttgagtgagaaattagctttcttgtttttcattttaaaaggtcatcatcacgatacacttctaatacctttagagtcattccaaatrgaaaagcaaaaaaagagcaaaatataagattatatcttatgatataatattcagatatattttattttctgttatgattatcacttagtaaattaataacaatcatgaaaactttactttttaattataattgtgaagactttgcattgcacccaataataagtctttccccctaggttttggcatttctcaaggtaaaagaagtaaatagcttcatttcaaagtgagagtgagtcaatcatgtatgtaccttctagaagtgcttcagccactaaatccttcccaaacgtgtgtgctgtcagcttcttgacacggggtatcttccataatatttgcacagttccaatcatctgtatgaaaattggcatcttcatttagattatgtctatatgccagattattttgaatcatttaaattatgtatataagtgacaaaaactactggtaaataaatcaattaaattgaaaataactgcatcaacccaatttttacagttatgcttcaagccatcattttgttaacatactatatagttagagcctcattcttatagataagtacaagtatctggatgtcctcacagtgatgcacatgtagctcttaagtgaagcattgggttcgttttcactgaagtctgctaacttattttcagacaacattctggaagacagacctgaaaataaatcatgtaatgacaagcttcagtttgaatataatgaagaaatcccaaagaggataaagaaagcagataactctgcttgcaacaaaggaaaggtgggtgaacggtttctgttaaatgacactttgaccatgtggtactcttgtcagtttcagatgrgattccacttgctccctgtccctccctttcacctttcccctcactttcccttagatacctgccaaagttcacttggtgatattaaaagacacccaccttccatttgtggaaagttagtcactgattcatccagccaatacctactaatggtgtatgtgtggcaggtactgaagtggcacagaggtggtttagtgatgaaggcagacatgtcaactgtgttgaatgtaagtgcatagaacagtgattatactgtgttatcagagaatcaaggacaggctctcagggaagatgaggtttcagaaggaagatttggctaaacagacaaaaacagaacattcgggccaagagggcagcctggtatgtccagggaattgcaagaagttttaaaggcatttgggatgaccaagaagataaackggccakatagcagaggaatgacactgagaataggaagataaatgagatacccagaccctatcctcaagtgcctcacagtttatagactctgagcaaatctttagacgcagttgcagtgacattgttggacaatggaattgtaagatatgtcaaaaatttgagccacggaagatacatagtcaatcctctatttatttaacaaagatttattgaccattccacatgtaagacagtggaccatgcactgagggaagatggaggatgaattagactcacctcctgccctcagaaagcttttactctaggaaagctgttgggacatgtatatggataattaccatgcaaggggaaatacagtaataacaccagaggaggacagataaaagagctttgggaatccagaggtgagtagcatataccttccatgtaaaatggtatcatttttcccttaccaggtttatgatatggaactgggagaagaattttatcttgatcagaataaaaaggaaagcagacagattgcaccagagctttctgaccttgtaatctattgtcaagcagtaaaatttccaggtaagattaggmaatatcatctataacttttaaagatatcaaaggttaaaaatatgccatttatttaattgggcattgtgaacactctcaaaataactaaattgtgttgctgaaatcattgttataatacctcctaaatatctttattattataatttgccttgatgctcatgaagaaaaataccataaartattcatttttcaggtcacacaatgtctttttataatagttaataattataaaagttataatactcataatttctaattgctaaatgtattaaatacttaagtactaggatttgtgctattttacgtacatctcctttacygttcataatgattctacaaggtaggcggtattatctccattttaaaataaagtctgagagggatgaagtaatttgccccaagtttcagagtatatcagtcaagattcttttgtttgaaagtggcagaaattgacctaagtaaagggaactttattgactcatgtgcttaaaaatgaagacacacaggtttcaggtatagcttaaccaaggtacatgctttctctttcctcatttctcattccgcctccatcatgttggctttctcccctttattcccttctggttgcgagacggctacagcaggccagcactacatgcttccagtttcagcttcagtgtaagagtctcttccagaacttcccgcagaagtgtcattgtttctcattgggtcctttaccaatcactgtggccaggagatgcagtgctctgatggtctggatcccatgtcacattctccactctgagctgggtagcaaggccccacccaaaccacaaggaccaaggatggcgttgaagtggaaggagagatttcccccaattgaccgtttttagaagtacagtggacaggctgatgaaccactttccaaaaacagtgtccttttcaattaatgaatggtagacctatggctctgaagcctgtctgtctccaaagtcctgcccttacccgttatactgcctggcctctcttgtttcgggctgttttcaatgaggtactcaattatgtgtcccacaaatggggcaccagggggtagaagacaaacaagaaagtccctaagtacatggaactcagaaaaattcatctcctcatactaagaaaaaggattctcttgaatataatttctgagaacaggaaagtggctgagataggaggatcagtctaaatgttagtaaacaggatttatagacttggcctggagagaggcactaaaatgccctcatcttttcaagatgggctgaactcaggtccctcccagagcatatcttaagcacctggtctcacacagtgcctgacaaatgggccagaggcattgggctatttaaaaattaggcaaactgggtgtagtggtgcgtgcctgtaatcccagctaccagggaggctgagcaggagaaatgcttgagtctaggagttcaagcccagcctgggcaagatatatagcaagacctcatctytaaaaaataataattaaatttttaaaatcacagttaggtaatagtgagcttttcacacatcagagtaaaaaaaatcatattatttaatgatatgataaaaatcatatatttcatgatattaaaatcattttaattgtaagttttctcctataagctgtttttaaacttttggcagctgctactgcttgtctgctagcaaatcctgttgaggaggatatgaatcaataagtagccagcaaagatttcagagaaatgcaggaacctggccatttaagtttaatttcacagaccatgacctcatggcatataagtacaatatgaccattatttgcaactggcaaaactctttttctgatggagtaaaaccctttacctgtcaaagagcctggaggctggcatgtccttcattgcaggaacaaggatgagcgccactctgtccaagaatcacacccactgcagctcttattctttataaatgcagcggatgccacactcggaccattccactggctttgtcttttcttctcaagcactcagtaaataaggagcacaaattcccaaagatatttgaagtctgtgtgaaagataaagtctctgtaccagtagagaatcgtggaagatcaggaggtcatgtgatagagcttctaagcatgtggttgttcggcttattttaaaaattccaagtatgttgttttttaaaagtgttcacatagcatacatttcttcataggtatagtgtattttctctttagaaaaatgaaatttcttacattttttccctgattttatttcctgtctcaaaatagctaaattggattgccagaatgattgttataataccttctaaatatttctttttacaatcatttgtttgatgcacatgaggaaaatactataaactgttcattttgctatgccgtttattttaattttgctacattatcaatttcagtgtatgtcacctttcatcatcccaagtcccttcttacaagccatatgcaaaaaaaaaaaaaaaacccttcattgcaatgaggcactcaacaatcatgtggtatgaggcccacagaaaggaaggaacttccccaccatcagaagctaggtcagtggcagggcaagagccagaattcctgtcagctcccaggggtgggctctttgcaccacactatggaagtagttgaattttttcgacctgctttctcttagggtttatttctcggttgcatttagtacttctattgtcctgggtttttttctccttctaatagaaaaaaaaaaggatatggtatttttattttatgaccccatcaacctagtttccaatatcttcccacaagctcccctgcatcccccactctcctcaggcacctacatacactgccgtctttctagtgccaggccattgctcagagtgttctcaaccttgcctggccttccttctccccttggccccattccaaattccaaggacggggtccttggaaagtatctgagactcttcaactcattgtgacatctcctttctggagctccttcatttataggcatatgtttgggtacctcctagatacccagttgttccacagttaggagtgcaaccttgttcttttattttgaatttttttattttgacagctttagtggtacaagtagtttttggttacatggatgaattgtatagtgatgaagtctgggattttagcgcacctgtcacccaagtcgtgtaagtcatacccaccaggtagtttttcatccctcacctccctcccactctcattctgagtctccaatgtccattacgctgctctgtatgccttgacatacccatagcttaaaagattacaaccctgtaagacaaaaattattcagtggtgacaagatcatcagataagatcgtgggtcagagacctgggctcttggctaccatgctttgtgatttggccaaggcaaatctctctgagcctttctcactcaaaagtggagttgactagaatccttgtttactacacttgctgaaatctccagaatcacccaggccacttgattaacatacccagtctcaggcctctctaccagggatttacatttggaaggcactgggaggtcctggtccctgggtttctaaggcaggcaattcaggagcaggtagagccagatgatctggaagtctgattctgagggggattttgcctcattctcctttggatccaccacacagtccacagagcaggtgcccagggattccatggtgaggctcgtccggaagattctgtgacttccagggctcatttttattcctacactgaaggagccacatggggagagccttgcaagtgtcagtccattccctggacacacactgtcattttctcagcactgagagacaagctttgttcatcaaacagtggtttgctaacaagccatttgaatgacaaaagtagaaccctgctgccttggacagctttgggctagctgggtgtaggtccctggcactgagagttgcctcccccacagagagccttggccatcccccatggctgttctgggttactcagacccacagtagtgctgcaggttggaacaccttggagggcaaagggatgcatttcaagaaatgagagggcttggaacagaactctcgggagaatgtcaaccaacacaccactgagaggtagccctgttcactgaaacttaattaccctcggtgcctcccaatatcttgcaaaaccagtgaacacagcttttcggacctatagtgactgggtaagatgaggccctgcagagcatggcaggcaaggcactcaggaaggaaaagtagccgtgtgaccctgagtggctctcggaccatccccagactcagcttctctcctgattttagcagtgccaatatgttgaatcctctgatgtctctgggagagcatccagaagaaagcctagcactgattatatttacagtaatgcatcacttaatcagggagagacattctgagaatgcttcattagattattttgtcattgtgtgaaacatcatagagtgaacttagacaaagctacagtgtagcctgctacacacctaggctagatggtgtagcctgttgctcctaagctaccagcctgtacggcatgttactgcactgaatacggtaggtaagtgtaacacaatgataagtatttgtgcgtttaaacatacctaaacagacaaggtacagtaaaattatgacataaaagatttaaaatggtacatctgtatagggcacttatcatgaatgaagcttgcaagactggaagttgctctaggtggatcagtgagtgagtgatgagtgaatgtgaagacctgggacattactgtacatgactatcgactttataaacactgtacactaaggctacactacatttataaataaaaatttttcttcaaaaataaattaaccttagcttactgtaactttatattttataaatttttatttttttaactttttgactcttttgtaataacacttagcttaaaacacaaacacattgtacaactgtataaaaatgttttctttcttatcttatttttattttttaattaaagacctggccttgctctgtcatccaggctggagtgcagtggtggaatcatggctcaccgtaaccttgaactcccaggctcaagtgatcctcccaccctagtcttctgagtggctaggactacaggcatgtgccaccaatacctggctaatttttctttttttttttagagacaagggtctcactatgttgcccaagctgatctcctggactgatctgccttggcctcccaaaatgctggaaatacaggcatgagccatcgcacccggccattttctttcttatttttctccttttttttttttcccattctgtgactccagccaaagacattttctttctttattctgtaagattttctctatttttaattttttttacttcattttattttttatttttttactttttaaacttttttattaaaaacagatacaagcacccacattagcctcgatctacacagagtcaagatcaccaatatcattgtcttccacttccacctcttgtcctactgaaggtcttcagggacaataacaagcatggagctatcatctcccatgataacaacgctttcttctggaatacttcctgaaggacctgcctgaggctgtttyacagttaacatatatatatatatgtaacttaaaaaaaagtatatatatatatacacacacacatatatacacatgtaatgtagaatgagtatactctaaaataatgataaaaagtatagtaaatatataaaccagtaacatatttattattattaccaagtatgttctgtacataattgtatgtgctagacttctatatgactggcagtgcagcagatttgtttacaccaatctaatcacaagcacttgagtaatgtgttatgctatggatgttaggacagcagaaggtgataggaatttctcagctccagtacaatcttaaatgggaccaccatcatatacgtggtctgttgacctaaatgttgctatatggctaatgactgtacatcgcttgtctagttagggagttgatttcaaagcttccagacagattaggatttctgaaggaagataccatcatatgcactggagtcaatttattctttttttttaagtaattctttttctttttagagacagagtcttgctaagttgcccaggctggcctcaaactcctgggctcaagcgattctcctgcctcagcctcccaagtcgctgggactactggtgtgcaccactgcatctggttctggagttggtgtattcctaaatacctagatggcttctgctcaaacttccatctcgaagctttagtcatgtcagatgttccaacatctatatctaaaataagcattcttattcacaatcacaagtaaaaacacagatgagaggaagaccctaaaattaactagagactcagctgaggaagagaggcagccaccaggctaaccatgtggatttaaatcccagctctgtctctccatgaccttgacttgaacagttatgtattatagctgctctgcacctgggattccctatctgtaaaaggggtgtaacagtcctaacttaaaggattgctgtaaaaagtagcaataaagtatctagtgtgattagcacatcktcgggagcatggtgggtggatcacttgaggtcaggagttcaagatcagcctggacaacatggtgaaatgccgtctctactaaaaatacaaaaattagtggtgcacacctgtaatcccagctttctggaaatgttgttatcggtaagtgagccaacggggtagatgaaggttctttgttgcttcttcattatttttctgggccccttctcacaattcaaaatccttccccttctttgatcactcagcccttgtttacattcttcccctccccatcccaaaagaataaccaggctcttcactgaagtacccacattctggtagaagatattgacatgtggcaggatacaggcaaaagtccagaatgaacagagcccctccccactggtccctcatcagttttacttgggagaaaatccattattaagtaattgtgtcaagagcaaaatgtacacaaatattaagatcaaggtatgagaactcaatagtctaagtttgtgcatgtttgctattatgaatactttggaggtaaaagaaaaccttagaagccccacattaagctataataataacagctactatggactgagcacttccctgaacaagacacactactaagtatggacaagttgagcatccctaatccaaaatgctccaaaatccaaaactgtttgaacgctgacatgatactcaaaggaaatgctcatgggagcatttcggattttggattctcagactggggatcctcaaccaggtgagtatgatacaaatattccaaaatccgaagaaatctgaaatctgaaacactttcatgtcccaagcatttcagataagggatattcagcctgtatatgtatattatcttgtttattcctaaccacagcccacttacagatgaggagggagtgttctagagaggttaagtaacttgtgtgagattgccctgctaggaacagattttaaatccagctgtctcactccaaagtctatgctcttaaacactactctatcctgtctcctctgatgatgttcttggaatgtgtattatcatctgaaatacgacctcctgaatgctgcttcagcttagggaattactctccaaaggtacagttatgacagtgggaacaatttggaggcaattctggcctcactggtgccttcagctcactctttttacattggagccaggtctatgtggtttgcattcatttcctctttcagcaaatatgtattcagttcctgctctgcaccaggcactgtgccaggcatgaagcatccagggagttgttagaccaggagtgagaaagagaagccataaacatcattatcaccrtatttcccatcttcagagtaaccatatgagtgagttcctatcattacacacattttgtagataaggaaactgaggaccaaagaaggaggtgttatgtcaaggctaatatcagcaggaattgaacctagacactatgacactaaaacccaagtaatagccattccttcatctctccaaattaaataattagccactgatcatttctggccacagcaccttcttttcatgcagtttttcaaaatctttctgatgcacaatcagctaagtgtgtgtgtgattttgtggtcattctgtgataagcatgcagttcttgttgcatttgcctatagagatttttaaaactttgctttaattgcctacaatgctattattaacagaacaaaaactgccagtagggtttctgtactaggttccaagggagtagtaggacttcaaaataaatattaatggggatggaaaatgttgagttgccttgcttgtagtttttggctwatttattttcattttatgggaacaggactgtcaactctaaatgcatctggctctagcagaggaaaagaaaggaaaagcaggaagtccatttttggcaacaatccgggcagaatgagcccaggggagacagcatcatttaacaaaacatctggaaaaagtaaagtcactttcttacaatatctttgcttgattctgcatgctggatgatttagatattttactgtctaagcacttcccttgaattttttaattctttttcctgaacattaatattgtctgagtatagtataaatttttgtaattgctaacttacacttttaacgtactaaaaacagcatttcaggctgggcacagtggctcatgcctgtaatcccagcacttttggaggccaaggcaggtggatcacttgaggtcaggagttcgagaccagtctggctaacatgatgaaacgccatctctattaaaaatacaaaaagtagccgggtgtggtagtgcacacctgtaatcccagctactagggaggctgaggcaagagaatcgcttaagcccrgaaggcagaggttgtggtgagctgagatcgcaccactgtaccccagcctgggtgacagagcaagattctgtctcaaaaaaatattaaaaaattaaaaaataaaaataacatttcactgaagatgtttgaacagtgtttgcctcacgagtaaaaattagaggcaccttggaacattcttggaacattctagtggtttcttggagctgttctcttcaccattataactccagaagatatggctattttatttctagttactttttattatgaaagtaataaattcttgtagttaaaaactcaaacaatacagagtattattaaaattcctttccactcaatgtcctggtgctattctccagaagtaaccactattaaatttattgtgttttgttcaagaaaaataagatcctttttaagataatccaaatgggatacaggcatacttcggagatattgcaggttcggttccagaccactacaataaagtgaatatcacgataaaatgagtcacattaattttttcgtttcccagtacatataaaagttatgtctacactataccatagtctattaagtgtgcaatagcattatgtcaaaaaaatgtacataccttcaatagaaaatactttattgatacaaaatgctaacaatcatctgagcctgtagcaagttgtaatatttttgctggtggagggtgttgcctcaacgttgatggctgctgattcatcaggggggtggttgctgaaggctagggtgtctggcagtttcttacaagaaggcaacagtgaagtctgccacatcaaccaactcttccttgtacaaaagatttctctgtatcatgcaatgctgtttgatagcattttactcatgatagaacttttttttttttttttttttttttgagacggagtcttgctctgtcacccaggctggagtgcggtggcaagatcttgtctcactgcaagctccacctcccgggttcacgccattctcctgcctcagcctcctgagtagctgggactacaggagcccaccaccacgcccggctactttttttgtatttttagtagagatggggttttaccatgttagccagggtggtctcgatctcctcacctcatgatctgcctacctcagccttccaaagtgctgggattacaggtgtgagccaccgcgcccggccatggtagaactttcaaaattggggtcagacctctcaaaccccactgctgctttatcaactaaatgtatgaaatattctaaatcctttgttgtcatttcaacaatgttcacaggatcttcgccaagagtagattccatctcaagaaaccactttctttgctcatccattaagaagcaactcctcatccattcaagttttatcacgaaattgcaggaattcagtcacatctgcaggctatacttctagttctcttgctgtttccaccatatctgcagttactccctccactgaggttttaaacccctccaagtcatccatgaagtttggaattaacttctcccaaacttctgttaatgttgctcttttgacctcctcccatgaatcatgaatgctcttaagggcgtctagaatggtgaattctttctaggaggttttcattttattttcaccagatccatcagaggaatcacaacctatggaagctttagccttatgaaatttatttcttaaataagacttaaaagttcaaattactccttgttcatgggctgcagactggatactgtgttagcagacatgaaaaatcatgctgtaaacagatgtgctgtcatctaggttttgttgttccatctatagaatacaggcagagtagatttagcatgattcttaagggccctaaggattttcagaatggtccatgagcattggcttcaacttcaagtcgccagctgcattagcccctaacaagagagacagccttttctttgaagccaggcattgacttatcttctctagctatgaaagtcctaggtggcatcttcttccaatagaaggctgtttcatttacaataaaaagttgttgtttggccgggtgtggtggctcatgyctgtaatcccagcactttgggaggctgaggcaggtggatcacaaggtcaggagatcgagaccatcctggctaacacggtgaaaccccatctctactaaaaatacaaaaaaaaaattagttgggcrtggtggcgggtgcctgtagtcccagctactcaggaggctgaggcaggagaatggcgtgaacccgggaggcggagcttgcagtgagccaagatcgcaccactgcactccaacttgggcgacagagcaagactccatctcaaaaaaaaaaaaaaaaaaaattctgttgtttaatgtagccaccttcatcaatgatcttagctagaacttacgaataacttactgtagcttctccatcagtacttgctgatattatgttatggagatgacttctttccttaaacctcatgaaccaacctctgctagcctccaacttttcttctgcagcttcctcacttctytcaaccttcataaaacagaagagagttcagggccttactctcaattaggctttggcttaaaatatgttgtggctggtttaatcttctatccagaccactaacactttccccatatcagtaataaggctgtttggcttccttatcatttgtgtgttcactggagtagcacttttaatttccttcaagaacttttcctttgcattcataacttagctaaatgtttatcgcaaaatgcctaactttcaacctgtcttggcctttgacatgccttcctcactaagcttaattatttctagctttttatttctttctttctttttttttttgaggcagagtctcaccctgttgcccaggctggagtgcagtggcgcgatctcagctcactgcaacctccacctcccgggttcaagcgattctcctgcctcagcctcctgagtagctgcgatgacaggcgcgtgtgcctggctaatttttgtatttttagtagagacagggtttcaccatgttagccaggctggtctcgaactcttgacctctggtgatccacccgcctcagcctcccaaagtgctgggattgcaggcatgagccaccgtgaccagcctagcttttgatttcaagtgagaaacgtgtgactctccctttcacttgaacatttagaggccaatgtagggttattaattggcctcatgtcagtatcgttgtgtctcagggaatcgtgaggcacaaggagagggagggagatgggtgaagggctggtgggtagagcagtcagagcacgcacatttgtcaattaagtttaccatcttatgggtatggtccatggcaccccaaaacaattacaataaaacatcgaagatcactcgtcacagatcaccataacagatataataataatgtttaaaagcttgaaatgttgcaagaattactaaaatgtgacacagagacacaaagtgaatacatgctgttggaaaaattgtaccaataaacttgctggaggcaggcctgccccaaactttaaatttgtaaaaaaaaaaaaaaaaaaaaaaaaaagtgcagtatctgcaaagtgcaataaaacaaagcacaataaaacaaggtatgcctgtataaccaaacatacatgtataactttatatttgctataacttttcacataattttctgtacatatagcttccttattctctttaatgcttgtgtggtggtccactgcatggatatactgtcatttatggaatcacttcttcactgatacatttgggttgcttcttggtttggtttgattttgttgtttcctatgaaaaacaatgctggagtgaatatccttgtacatatattgtttatttgtgcaaatataccacaacccaaatgaagtactgaggcaaaggacttctaggcttttaatttaaattgatgttgctacattcattttgttttgtttcttgtgtggggttttttgtttggttttattttatttttttactttttgtagagatgggctctcaccatgttgcccaggctggtcttgaacttctgggctcaagcaatcctcccaccctgacctcccaaagtgctgggattataggaatgagccaccacacccagccaccacactcattttaaaactaagtagccaccatgttgttttaaagtggcgaactaactcacaagtaaaatccaagaggtattctgatgtggtttatatgctatgactgtttactgggatgttgttcaggtttatctttctaaaatatttaaagttttctacactaatctgcggctaatttcttggggggtttaggttcctgtgaaggcattcgacagacctgggaggaatcttcttcccctctcaacccaaccacgtccctcagtgctatcattagaactcccaaatgttatcatatctcgtcgctgaatgaaaatgccgccaaacgtctgtgtcgcaggtattctcagaaactgayccagcacaccgcctgtcagctgctgagaacttaccctgctgccacccgcatcgactcttccaacccgaaccccctcatgttctggctccatgggatacagcttgtggcactcaactaccagactgatggtaaggrgcctgcatgctcacctcgctcctttgcatcttacatttcagtaaatgcagtttgacagcattttttcaaaggggcaagattccagactggggcacaccatatgtgagagtaaaaatatgatgatggaaaacagaagtgaatttgatactgaattgtgcctccgatgtttcagattaaggtgatagaaaagaatcttgaaggggcctgtaaggtctcctggtcctgccccttttttaatgcagtttttcaaataccaagctgctcttgacaaagccatgcccggtttatgtttaaagytctttttggagcagggatttcctaacactgcccagttaacctgtctcactacgcagttgttcttgcagtcaaaaggtagtgtcactccaaccactttgcaagttaaaaccatgttagcgtcttatccttttggaattgagatggagaataatggtcagtgcccgaagagtagctagcaaaaggaaaacaactatgtgaagtacatgaacagagtaagtagtgatcatgtttctccaatgtcaatgagactctgatatgacgcctaaaactccagagtagaagctgccgtttattgcacgcttactgtgcattaggcagtacgctgaatttttgaccccctattatcttatttaatattcacaacagccctaaagttgtgtacctttatgatcgccatttctcagatgagcaaatcaaggcacaaattggttaatttgttcaaggttgcaggatgacttgtagtaataaattcaaggagtctggaagtttaaaggataaagcattatgtttccacttggttatgggggaggagaggagctacagaaggtaagagtagataaatgtttcctaaaagctctttcataaaccacagtttttcctttgaacagtcaagcggcaggcagctgttatcattcatctcgcgtgaactgaatccaatctcatctaaccatgctgaaccacaaaccacagtatggccttgtctccagctgaggtcaaaccacagctttagctctgggaccagctagctacctggcactggtgccaacaacacccattggtggatgccccaaagacatatgattagagatattggtcacatttctgcccttgttatatgtgcttctttcagttaaaattaaataagatgatgccggtgaagtaccatatttagcatagtgcctggcacatagaaagcattctacaaaggttaactatcattgattgtgtttgataagttatgaaaacagtatgatttgggctcacaaatggaaataattgtgaaatactttcaaagttgtaaaaactttattttctatttctgttcattctttcctgagtggctggtgggttcacatctccagccctgtctgtagtcctgtgtccacctggtgccattggttattatcccggcatattttaagtaaactgaagtcactatcaaaagattttctcaaggaaatggaagtgcatttggttttggatgtgccctttctctggaagtgccaggactggtatagacacactggctccactgaatagcaaaagggagcaacaggtgaaggggacacagggagctgccactccatgggccatcctgcagtccagaagtacaaactaaagctgcctgtcctccactgacccttaaaggctttgcctctcttccaaatcaagttgggattgagagtacgtctttaagccgtcccactcaaatggctgtgctgtgtggttcatcctcaagtttctctgcataatcttccaaaccgggaaaaggtgctatcatataacctctctccattcaatgtgctgattaaacatctccccatgttggacaaaatacaagcaacatgcagtatcagtgtgttcatctgtaaaaatggtcttcatttctgcaaactgggggtacagcctgatttaatattaatactttgcacacagtagatgctcagtaaatgcttgttactctgagttgaggcagattatctctgtcagccccactgcaatatgaacatgtggttcttgatttttggtcaagatcttttccaagtgtttacttctctgaattgcaaattcaaacagatagataaggccaggtgcagtggctcatacctgtaatcccagcactttgggaggccgaggtgggtggatcacttccggccagsagttcgagaccagcctgtccagcatggtgaaaccccatctctactaaaaatattaaaacaaaatagtggggcttggcggtgtatgcctgtagtcccagctrctcggaaggctgagcgggaagcagaggttgcagtgtatcaagattgtgccactgcatttcagcctgggtgacagagcgagacactgtctcaaaaaatacatagctaggggccgggcacgatggcttatgcctgtawtcccagcactttgggaggccaaggtagrtggatcacctgaggtcaggagttcaagaccagcctggccaacatggtaaaaccccatctgtactgaaatacaaaaactagccgggcgtggtagtgcatgcctgtagtcccagctactcaggaggctaaggcaaaagaatctcttgaacccaggaggcaaaggttgcagtgagccgagatcgcgccactgcacttcagcctgggcgacaaagtgagatactatctcaaaaaaaaaaagaaaaagaaaawtatatatatagatagatagatcgaatagatcgataagagtcaacagtggaagcaccatttttcaattgttgaaaagaatttccaggctggaaagtgcttgattttccatgaagcatcccaactaaatagcagagaaaccctcccagggccagcctcccaagaggtttcatggatcatctgctctgtgacttcctggatttcaggggattctaacgctccaagtgggtgtccatggacttatggccatcccttcccaagctttctgctggttccatcaactccaagaaggtctgaagtgatctggaaccaggagtttcccagatcaacactcaataaaaccaactcttgagtttagaaactgacgtgaggctggtatgcaaacccctggttattgctggcaacagaccctctaagttctttgcatctgaggcagaacaataccgcctcacacccagacttacaatgtgtaaacatgcaaccctagtcaaaagaaaaacttctttttttaaagaatttattaagcttttttgaatgacagacttccaatcctcaaatataaggataaacattatgtgaatggtgtctacataatgcagagtattttaatgggtagaagaccatcaaggcaatggtatgtttatctatcattatgtgcattgtttcagaggtrtagcagggttacactgatttgtgcacactttttcacttgattggaatgatgatttttaaactatagccccagatgaagttctgggaccatgtccaggggacagcaagagggctagatttgaggtccgacctttatttcaaaccgtgcggctctacgtggatctcttttacatgtttggtcaccaagttagatttcagttaagaaactgagcattaggggaaagagctgatgcacgctgggtttaatacctaggggttgggttgataggtgcagcaaaccaccatggcacatgtttacctatgtaacaaacctgcacatcctgcatatgtaccccggaacttaaaacagtaaaataaaataattttttaaaagcttcaaagttttaataatagctttagagttttggctttacagctttaaagttttggaaaactattagggtagacacggtgctactgaaatcacttgaggttgatgtcatgatcacaaaaaaaaaatagttaccatttattgagcaccttgcatgtgccaaatctcatttactgtatccacacccctataagatgtacattatatggctcagtagttaagattgggaacaatggktgaggccatctgggctcgatttatagcatccaccacttactcgttatgtttcttgggtgttttcactttttctgcttcagtttcctcatccataaaaatggagatactaaaaggatctgcttcatagattattgggaggtacttgatgcacataaagtgcttagaatggtgtctggtccttagtaagagtgcagagtgcgagctgccattgctgttgttagtactgtatgtccatttcacctttaccaaccccatatgagctagctggcttcaccctctttgctaccctcaccatgtctgtgttcctctgtcatgaagtggcctgagaagagaattttctcccaatgcaggtgaggcagcatggccacaatgaaccagtcacatcaggactggcaggggcctgagagatgaggtcctctgcaatcattttacagataaggagctttcatatgtctaagacatcttacactaggaattcctgcacaaaatactggccaaccccacagacagggaaacattttacagacaggacaagtagaggccaacttctcattgccccagggcgtttactgcactttgccttgatgtggcccatgtacagagttcgttcttacacatggaaggaatctatcagagggagtattcatcaggtgtgtctcatcaactttttgctcatttgggtaacttttatacagacttgcaccatcaggtgagcatttgagtgtgtaagagcccagaaacagtgcaagaatccaattgttcatcaaagtactgtgccaaataaaatttggcaacaaaaaagcctctgtgaaggttcctgatgtttatgattgaggggattgtggacatgatgtgaatcagatgtgattattttttttcatgtttacgattttttaaaaagaaataggtgtattgtaatttatgggatgaaattgagatttcaaggaaaagcatgtttttctggctattctcctattctttcttgtataattaagattttatcttacatttgaaatagcaagaattgtccatacaattgtctgcatggcttagagataagccattattcctttctaaaatttagtataaaataagtagagttgcccctccatatccttgggttccacatctgtggattcaaccagctatggattgaaaatattcattaaaaaaaatggatggtcgcatctgcactgaacatataacagccttgtctccttgttatttttccctaaacaatacagtatggcaaccatttacatagcatttacattggattaggtatcataagtaatctagagatgattttaagtatacagaagggggagaatatattcagggcaacttgaatctaggctcccaggggaaaaaaaaagaaaaagtatgcagaaggatggtataggttataatgcaaattctacaccatctatatcacagacctgagcatctgtggactttggtaccttctcgtcctggaaccaatcccccatggtcaactgtatttcacaagatttttcagacagatgtagcaaatatttgcaaaggagtttttaagtgatttcacctagtttggagtggtaacactgggcatatccatagactgtaagccccagagggacaggaatttttctcttattacctgctgtatctgatgcctcacacaacttggcatatagtagtcatttatcaatctgtgggacgaatgggtgattatctctttttcatgctggagcttagggaaaattgatgcaaagttcttttgaactttmaatttataaggtgatacttaagcgacaaagtaacaagctatattggctttctttgttgtttgttttacagatctccctttacatttaaatgctgcaatgtttgaggcaaatggtggttgtggttatgtattgaaacctccagttctgtgggacaagaactgccccatgtatcagaagttttctccactagaaagagatctggacagcatggatcctgcagtctattctttaactgtaagtacggcccctagagaaagaacataaggtcgggtttaagccttcctgaaaacgaactggttttgaattcaaggcattggaaagctgtcatgtcacaatttgggtcatacagatttagttcccagaataatgtatttattttccaggaagcagtagctatggctagacaagctgttgccagacactgtgtttgccagagcccaggagcagggcatatgaggtccctgtttcacctgatgttctgatgatggtaactctgtcttccagggcccacagaatcataactatgagtatagcccatggaagttgagctttttgttagatcagctcatgttaggcttcaaagctctaagatcaaactcatgtcaatatataaatacaattaagtatatttcctccgtataatttaacctttatcattcctgggcctttccttattccttttcacctaattaacttattgtcaaaactccacagactcctcttaaaaacagacctggccaggtgcggtggctcacgcctgtaatcctagcaatttgggaggcccaggtgggtagatcgctttgcgctcaagagttcgagaccagcctgggcaacatggcaaaaccctgtttctacaaaaaaataacaaaaaaaattagctgggcatggtggttcacacctgtactcccagctacttgggagtctgaggctggagaattacttgagtccagaaagcggaggttgcagtgagccaagattgcaccactgcactccagcctgtgtgacagagtgagactccgtttcaacaaaacaaaacaacaacagagacctggtcatctctttccacctttagatcttgtctctctctctccacaggaagaatgccaggcagccctccaagtacgacacccccaaacccctgggataaccccattcacagactttcctaccacccaaactgctttttctctttccctaagacagcagggcagtagcccctttcctatttgttattttttagatagaggcgagggtagttttatctgtttacagaaagctgtgaattagttcctaacacgtctgtgacttgctccaaaatgaaactattcaagaaaaagattttgaagttataaaatcctgtggcattttgaacagaatattagtaacaaatttatgattatattgcataaagtcttctcttgtgagaaatttaacttcatcttgtttggtttttgaagatatttgaacattttgatagttgaaagcttacagttaagtgaatgatgttgacaaaataggcttttcatatgattccagtcgtgtgattacccagttacaatcacttactttttttttttttgagatggagtcttgctctgtcaccaggctggagtacagtggcgtgatctcagctcactgcaacctctgcttcctgggttcaagcaattcccctgcctcagcctccctaatagctgggactacaggcgcacaccaccatgcccagctaattttttgtattttagtagagacagggtttcaccatgttggccaggatggtctcaatctcctgacctcgtgatctgctcacctcagcctcccaaagtgctgggattacaggcataagccaccgcgcccagccctacaatcacttactttttaaacagttttattcatcattcactttgtccattccagtgttcttgggattcctttgcagagggaagcagtgaggtgcagaggttgtctttcttttttatcctcggtgactttgatcccttttgtctccctcaccctagattgtctctggtcagaatgtgtgccccagtaatagcatgggaagccygtgcattgaagtcgacgtcctgggcatgcctctggacagctgccatttccgcacaaagcccatccatcgaaacaccctgaaccccatgtggaacgagcagtttctgttccncgttcacttcgaagatcttgtatttcttcgttttgcagttgtggaaaacaatagttcagcggtaactgctcagagaatcattccactgaaagctttaaaacgaggtagaataaaattgtccaaatgttaataattgttgtagctaggtgatggatgccagaatttccttatactcttctctcttttctgtttgacattttcctataaagaagttgaattaagaagcaaaaggaaatacaaattggagcacttttgaagcacatctcaaaagaagtttttcttttacattttttaagaatctgaggtattaacaatatcccttgtaaagtacagcctcacccatgcttgctgatgtcaggagcagtggttgttgctacccacggcactgctggcagtttgaaagcagggattgaaataaggagaggaaacatgtcagaggggtcgggtgtggtggtggcataagtgaccgtgcagttggagtcggtgcctggcagaagtccagttttggaagctggggctgggtttcaggtgcaggaagaggggaatggagaattctgggcaaaggctagagctatttgcttgtagattggctttgttgtggcactctgatgaatttcagcctgtgcattgtttttaaactttgatgtgcacaggaatctgctaggactggtaataccatgcagatcgtgattcagtggcctcaggtgaagactgacagtttccctttctaacatatttccaggtgtgctggctctgatggtctcctttgagcaccaatattctaagtacacacttcctctcccagctacactcaagctgccatccttggagctcacaaacacattacagtttcctacttttgtgatcttttcctgtttctcttctgtgtgcaagtagcccrtggtcatttaattagtctgctcaggctgccatcatggaataccacagactaggtggctgaaccacagaaatgtatttcctcgcagttctgaaggctggaagtctgagatcagggtgttggcaggtttggtttcttctagggcctctctccttggcttgcagatggtccccacacagtcagccctctatgttgtctgtgtcctaatcccctcttctcataaggacaccagtcccactggattaaggcccaccctaaggaccccattttaacttagttacctctttaaagaccctctcttcaaatatagtcacattctgaggtactgagggttaggacttctacacaagaatggggagtatagggtcgggggagacccataactgttattatagaaatgtgagaaagtacatagaaacaaaaacaatttttttttaattatccatttttccatctctccaacacagtcactcttggtgtataagtcttgcaggctttgtttctctccccatgtacgtaacacatgagcatacagatatatttttaacaaacaggctttctactaatctttgtgttttgtaacttactggttttcacttactaatgtatacagtgagcaacctttcatgttaataactatacatgtacattaccatttttaccagctgtgtattattccattctatacttacacttacagtcataccrtaaattataaccaatcttccattgtgggaatgttctattatcactaaagctgctctaagatggaacatttgtaaaacagggactgttagtctgttagtgcttcattcacagggactgttagtgatcaggttttcctactagatcaggttttgtctgagtttaaggttttctgtttgagtctaagttggaaacagtacttggacaaattaattgccattgggtaactcagggggcagcactctcttggcgaaaagacgcctgttggttgcatgcctgttgccatccctgcccattttaaggtctttctacctgtcatttgcygacttccaggagcatcttcttttcagtagccatggttaacaagcttttcccaattctgtattactccaggatatcgacatcttcagctgcgaaaccttcacaatgaagtcttggagatttctagtttattcattaacagcagaaggatggaagaaaattcctctggcaataccatgtcagcctcttcggtaatgaagttctgtttcactcarcatatttatggggattgctacactgaaggtgggcttttttgtggcccagcaaagtggtcggtgtgagttattaattaggtagctatggaaattaataacaataatggctgacacttggcactgactaagcactttacgtatatactaactcagtcctctcaataacgtcaggcagtagctatttagtatcatctccattttgcagatgagaaaggtagagctaagtacatctgaggtcacacagctagcaagcagcagtccaggatttacacccaagttccagtaacaaagcccatatattacagtgtctatcagggaagtaagccaaatataacaaagtgaggaagaggcttattatgcgaagcctagtaggaagcatttccaatacttctagaaactttaggttaaaccaggaaaatattttgtttcttcagcagtccaggggcaaatgtcacaggcagagcaaggctggagtgagcaataggctctgctggcgatgcataacttgcacctcagtgcttggcagatgcagaagctgctcccttgagaatggaagaaggacactgtagaaagkgccatagttgcagaatctgcttttttttttttccagagacagtgtgtctctgtcacccagtgtcactctgtcacccaggttggagtgcagtggtgccatcctggctcactgcagcctcgaccttcctggctcaagcaattctcccacctcagcytcctgagtagatgggactacaggtgtgtgccactatgcccagataatgtttttctatagagatggggtctcactatattgcccaggttggttttaaactcctggactcaagcgatcctcatgccttggcctcccaaggtggcctcccaaggtgctgggattacaggcatgagctaccgcacctggccagaatctgctttttaacaagtgcctcatggaaactcagtgcccactaaagtttgaggacacttggaccatggccccctcactaatgcaggatggtttaattaggtaagaatctgggctgagtgcagcggctcatgcctctaatcccaacactttgggaggccaaggcagaaggatagcttgagtccaggagttcaagatcagcttgggcaagaccccatctctattaaaaaacgtgttttaattgagcatagtgtcgagcacctatagtcccagctacctgggaggctgaggcagaaggactgcttgagtccaggagtttgaggctacagtgagctatgatcacaccactgcactccagcatggacaaagaatgagatcctgtctctaaaaaaggtatttttaaaacaactactttaattaactggctaattccattatgcttcctctttaaacatacattttaaaagtgtatccattggttaccccctttacatgtttaataatgtgattacttctgtgtcaatctcagactcaacgtagtcctaacaatctttggaaaggcaccttctgcgctcacaatggcactggccatgatggcttccactgccactttctgctttcttttctgcccttctcctgccctcaccactatcagttttgactcccgctgtccctgcccttgtttgcttaggtgttcctcctttttcccttcatcactccacagcaaccttcactgtacatttgtatcacctggggagctttaaaaactccatgtgcacaggccacaccccgcaccaattaaaccagagtctctgcaggtgggccccaggcatcagtttttttaaggatcatcaggcgattgcaccatgtgtccaaggtttagaagagcactttggccaaagtggagggaggtgtggcttccaccttgtgcagaggattgacaagcaagggcagggccgcgtggtacaaagagcaggartcacatgctttcagaaaggcagagcagggccaaatacccaattctgagctgggtgacctcgatatctgttacagctgaagattccacagatgccacaaatgaactgtttttactcacgacacttctgacaccaaaaacatggtgtcttttccaactctctggcaacagctgggtgtcctacatttcagttcaattctaacactatccatctagagttggtgtcagatcccacacattgagggctcagtcccacaagactactcctacttcagatgccagtcagaagtcccaggttgtcaccaggacttctgaccaaacagctataaattcaggggatccatataaatcctcagattcaagagtttgctagaatgacacagaactcacaagagtgctttgcttattatcaccagttgatcagaacagatgtacttcaggagcagcctcatggaaggatgcatggaacaaggtatgggaggaggagtgcagagcttccatgtcctctccaggccaccctcccagaacctcgatgtgttcaccaacctggaagctctcggaaccccatcatttagggtttttatggaggtttcatgacctgggcatgattggttcaattattggccactggtgatcagttcagtcttcagccccctcccctccttgaggtctggcagcagggctgaaggtttcacccttctaatcatgccttggtctttctcagccaccaatcatctcattagcaacaaaggacactcttatcactccagagatttcaaaggttttaggagctgtgtggcagaaactggggacaaagaccaaatatgtattttttgttatatcacaccttgccatccttgggcttcctgggcagccatatatggatatgtgcttggtaaatgtgcatttgaccatggagagcatcactctccattgctgaagccaataactgtagatcatcctggccttctgccccatttaagacttgatcattctatttccttagtatctttcaaatccattyatcttgatctgtctttattgccttggccctggttcattctcacctggcttgtggtagagtcttcctaattggtctcatttcctctgggtttgccacctctgtctgtcctcatctagggcatcccaaacagatctatctaaatatgatcatgtcactcctctgtgraaaaccctccatcagttctccattgctttcagggtatagtttataccagaagtaacaaattcacatgccaggaggatcccaagaagatgatgtgcaggcatggacctgggctgagcacagactcttagaaagcagagagctcatgggtcatttagaggggagctcatgggtcatttagaggggcagctgtcacctagctctcagctctagctgcttgttgccttgtgatgtcgtcagatctcttggtttttcaagagaatcaggacatctggggttttgtaaatgttggcaactatttaatctttttaattaataatatagtgcaagctaaatgatacaattagaatgtgtgcattttatagtatgacaattatacttcagtaaaactgattttaaaaaaatcacattgtgcaagcataacaaagacaacctctcctccccaccccaaataaaaattaagtacatgctaaacaatacacttcagccctcaggtcctcattttgccagtttcagtctaaattttagccagttaggcaaagccctgaatggctgtgcttttgcctgcatctccagcctttctccctccaacaggttagttgtagaacttgctgaggttcccagaatgccctgctgtaggccatttctaagtcttcatacacatgttacgtcaatttggggttctcttgtctcattcttcatctgctaaattacactaggtccttcaagatttggttcagataccatttttcagaaagccctccctggtttctcccttacctcttctaggccacctcctctggaacttaaaatgctctttacaactgcctactttcccctctagctatctcattcaactggaagcccttggcagggatagtgtcccatttgcccctgattttctagggacaggcataatgactgattcactataagccttccataaattatttatttcaaatgaatatatcttaatacacaaaatgcccgaagaattgagttacacacttaccgacctctttctaacagatatatgtttgcattctaatgattcatgtgcctgaatgatgtactctctaaaggcagaacattttattattaccatccaaatttctagcccagtaccctgaagagagatggaactcaatagatactatggaacatcagttaataagaactaacatacatttcagataatatcagcctctaattatgatggaaagagacactgtaatttaaaataatattttggtgatgtgcttatgaaataccctcactaaatgactgaggaagaggtaccatttgtagcactaggctacaaatggactctcatcttttgcatttacatgttcctatccgtacttctaagtactagcacctctgtatcaaatagagcttagaaatatgtgattacggatgaatgatcagccatgtgatcttcttgacagatgtttaatacagaagaaagaaaatgtttgcagactcacagagtcacggtgcatggggtcccagggccagagccctttaccgttttcactattaatggaggcaccaaggcaaagcagcttctgcagcaagtaagtccactgagccgtggttgggagaatccaaaatctaagatgtatggatgtatgtgtgtgtataaatgcctgtgtgtaaacatacacagatgcacatgaatgcgcaaaagtccatgtggatgatatgccttttgattatttggaaatgtgttattcaacattgagatccactccaagaatcayctgatggatcttggtaccactagacaaactaccttcaacctgtagagaagatttttaatgattcttaagctatataaaataccaggctctagaatgataaagaccggaatgagtggccttccaaccatatatacactttcgccctaagcctagacatggcctaatcttccttcttcacgcagagattattaatcaatcagaatttgcacattaggtgaatggaatcttcttgccatcygaggagctgaatcaaattcttagagcttcaggatgggccacgtggaccaaggagacattttctgcccctccagcctaaggccttcctttgcatgttgagcagcccccttgctcccctcccctggcacctgaccttggcatttgaggtcctctccttttggtggtagcaagaggcatggagaccctgagacctgttaccccaagccctgtagcagaactggcctaagtctccttatgctgtgccacctccgccctagatccccctccgaaggatctttgtggccttctgcagacaggtccccatccatggggggacttctaagagtgagagagccagggacatggagcagcatccaaagagggagggggcatgtcctccaaagggcgaggcagggcccatgcgtaattccttttttcaccacaccagaagcgctatccttgcttggcacagtggcctaaaatccttgcagatgattttatccttaacccatttcagaattccttctccatgcagccaggcgcagtggctcacacctgtaatcccagctctttgggaggccgaggcaggcggatcacgaggtcaagagatggagataatcctggccaacatggtgaaaccccatctctactaaaaatacaaatattaggtgtggtggcgcacatctgtagtcccagctactcagtaagctgaggcaggagaatcatttgaacccaggaggcagaggttgcagtgagccaagataacaccatggcactccagcctgggtgacagagtgagactctgtctcaaaaagataaaaaagaattccttctcctgaataggagtagactaaaggaagcaatgaccaagggaatggccctttagctccctctgaagttagggtgtatgatgaaatgtagctgggatcataacatttggaggaattaaaaaccaactgaacaatcacaaataataagtgtcaataaatggctctgtctttcaagggcacatctctatagacaggctaacattctgtccaacattttataactgacttaaatagagaaaacagctcaggtgtcacatttcatagattatcaaacagaagctattaccaacagtttgttttggttttgttttaatacatcagtccatgtactttagtgtccactatcacaaagcactgctgaagttttgtaaaggaaaacttaccaagagccacccatagcagtccattgctttactgtcacccgtgcaaatcagcacacagatataaagcaggactgagcagggggtgatgctggccctcttgtggaggtggcccagaagcttcacatcctgaattatccctatagtatttgccttggcccccttttgagtcaacagcatttcatcakttatagaccaagggctggggtggagagatttcagtcttcctgagaaccttcactcccactgccctcagtccatcacattctgcttttcctcctggtgagatgtgttcgctctgggctttgccttattggcaggggcctgaggagaagggtgtttgcttaatccagaccagatggtggcagctttctctcatcaccaagctacttctcacgggaaggcaacaaagggagtttcttcactgcaactgacctttactcccttcaaattcagccttttgtagtaacctgtacaatatgagtgagaaaatacattggtaaaactataatgcctgtaatcccggcactttgggaggccgaggcgggcagatcacttgaggtcaggaatttgagaccagcctggccaacatggtgaaaccctgtctccactaaaaatacaaagattagccaggcatggtggtgcacacctgtaatcccagctactcgggaggctgaggcaygagaatcacttgagcctgggaaggcggaggttgcagtgagccgagatcacgccactgcactccagcctgggcgacagagggagactctgtctcaaaaaaaaaaaaaaaaaaagtaactataatggctcatctttattgagttcacctaatgtacccatgttatgatttatgcttcaaccataaaacaaaattaagattgctactatttccattgtgtagatcggaaaacagtctccaagggattaagtatcttacccaataattcgtagccaacaagtattaaaggcagacctcagactcaggtctgtctggttccagggctttgtctcagctgccctgtttgactgcacagggtcagcagccaacaaagaaaacaagccctttaagcacactgtcagaagtttatttaaagaagaattcccaggaacttagaccacatgagaacctagccctacaaaccttccatgagaagatgaccgagtatttccaatgtgagaaaaagagattatcttagtaaatactaaactaggttatttgccctcagtcctgtgttgcaagattacaaagggctaagttcatggaatgagaaacctaaaatttttaattcactaggagctctcattccagcagtgggaaaaaatagttatgctgtctggggattatgaataagttgtgccgttgcccggagtgaacataaacaatccattctgaacataagagaattcttagatcttccaaaaagaattatgcaatactctagagtaaatttcacttataaattgcatagcaaacctatctgaacaccatgaaagttgatttgttttaagtttttgcctcactcctcagtttgccttcactttttctttagattctgacaaatgaacaagacatcaaacctgttaccacagactattttttgatggaagaaaaatattttatatctaaagaaaagaatgaatgtaggaaacaaccattccagagagccattggtccagaagaggagatcatgcaaattttaagcagctggtttccagaagagggatacatgggcaggattgtsttaaaaacccagcaggaagtaagtgtgtctgggtgcagcctacacartaacgactcattatgtgattagccatttaccactcacaacctccctgaaattcagaatttcttgtaattgcaacttggtttatattcttcttaagtaaatgtggatgaacagttttattcttctgcacataatcagaatattatctctaaggtacagaaattcaatctaaaaaacatcccttagaccgggcgtggtggctcacgcctgtaatctcagcattttgggaggccgaggtgggtggatcacttgaggtcaggagttcaagaccagcctggccaacatggcgaaaccccatctctactaaaaatacaaaaattagccaggcgtggtggcaggcacctgtaatcccagctactcatgagggaggctgagtcaggagaattacttgaacccaggaggcagaggttgcagagagctgagatcgtgccattgtgctctggcctgggcaacagaacaagactctgtctcaaaaaaaaagacaaggaaatatgttttctcacacaaataaactattccattttaaaaataaataaaaacataccttataagataaaggaagcaaagattccttatgcatgtcatcagctatgggtccagtattttatttgtatgtgtgaaaagacatcgttgtgagggtcacattactgtataatgcaaaacctgcaggtattttctattctggggatgactgacttccagttttagctaatagaagttttagctaatagaagcttccatgcttacaagtaaaataataatatttctttgaaaatattccagaacttcatacaaagtaagaataatatcttggcctgagtcagaattagtaacaatttatattacgtgtgctaagattcccatgatcattcctgggaaggaaaggatgcaacaactgccatgttgactccaaactgattggctcctgtttgacttaattgatgaagcactttttttttcccctgaattaactgagaaaaccctactaacttaagaatgacatataaggtcatttctctagcatagacagtcatgygtcatgacatgttgatagtcaagcagttgagtctattcaacaatttgattacataaatattgagcacctaatatgtaccaagccctgttctrggcacatgatctgctcctttggggcatgtaatagtgcttgcctgatagaaggtgcctcaggcccatgcttgctagggcacagtgaagataatagccaattttaaccattgtgtgttttcactttctagtcacagtgagtgaatgtgacctaaagcctctacagagctctagcatcaactctagagcccagagccactgccttctttccctgaccttgcctgagacaatgaaagggcatttaatttaagcaaaaaaatgtaattgtctccccagccttctctccctattaagacacactaattgctaagacagagaccaggcaaccctaataataatcactttatgataaaatatcagagggcttagctgtacttttgaagccatctttaatgtctaaatttttgtcctgttcctaaattgtcttgccttattaattagctacatgtaaaaagtatgtatcctctaagcgatgtcagaaaatcagtaaatttgtaaacctcatacttgtgtatgatttacagcgttgaaagccctcaaacactatgttgaatgatataatggaaaccattttacacttaaggaaatagattcagagaggtgaaatcatgacagggttagaagtagaaagaactcaagtctatggcttccaggtcagtgttctttccaccatcctgtgctacccaagctgaaattgtgtccatccttgtggatcacccacactcagcaccttgggaggagcaggaggcagtgggtaggctagagggaagacaggctggctgctgagtgtcacaggaagcttcattttatgctcagaggagctggggaggtgagggacacccaaatgcaatttaaatgtataccacaacaagctgggcacggtggctcacacctgtaatcccagcactttggraagccaaggcaggctcaggagtttgagaccagcctggccaacatggcaaaactccatctctactaaaaatacaaaaattagcagggcgtggtagcaggcacctgtagtcccagctactcaggaagctgaggcaggagaatcacttgaacccaggaggcagaggttgcagtgagccaagattacaccactgtgttccagcctgggtgacagagcaagacttcatctttaaaaacaaaaaaaagtatatgacaacaggcagtagggacctcaggaatatgcttccaaaaggctggtaaaggaaggcattttgaagaaaaaggggcataaatcagaagggaaggctaacaagatttttctgataagtaaaatatggcaagttgtcctttatatgcctttgttaggaaatttttgaaatgactgaaatatatctcaaaagataactaaatttagtgtatctaggtttacctggtgcatagtgatacccaaataataattgctgattgaataaatgaattcagtaattactgaatgtaagagggcactactagaggagacagatttgggctataagtatttccatttattttatcccatggaactaataagacatataagcagtttgcccatatatgaaaattcttcagttgctctctgtgacctctgatctctcctgccttttataattttcttgtctcctgggctttcaagctgtcagataccacatcttcctgtggtcaatgtgtcctcttctgttactggatttgaaattgggtaaaccaggattgtcacaatgaacagaccacctaacttctgtaaacctcactgccctaatttgtaaaatctatatacaaactaccctacttgactcaaagaaatgatcatgagactcatgtcaaacatgtacacagacaaggtgtacaacaatgcttagtaaaaagggatataagtgagggctattgttattttgttcataacctgtggcttcgaactaatgtggctagaaataccttaaaataagctctgagggaggctcaaaggtgctctttttttttttttttttttttttgagatggagtctggctctattgcccaggctggagtgcagtggcgcgatctcagctcactgcaaattccgcctcccgggttcacaccactctcctgcctcagcctcctaagggtgctctcttaaaaataaagcttaatgcatcgttgttgggacattttatgtgccaactctggttttctgatttcttgcctcctggtttgggggacaaagattataaattatgtcatgtgaattacctctcaatcttactctctgactggttaaatatatgatgatcagtgcaatgacatattattaagcaagttgtaaaacagtatacataggatacaatctcattttatgtaaaaagagacaatagctcatctcttcccccccttccattatataatggagtattcattcatgggaaaaaaatcaaatggattttttcactcattgaaaaaagttaaaatagattatatatctttatttatttaacaaaaaatcatgtaattataaggccatgattgcaaagttaattaaatgattggggcaagcttcaraagccagtcctttctggccctggttgcagttttggcgccacctggtggcagttatctattctgactttaatcaatgggtacaattctagttggaacttccaagatagcgacagcaactcatggattcttctggttagttagttagcacccatttcagtagcctggtctggagagatgaggctagaattctggggataagggagttttcctgccaagacctcacttgctgagatgaggttgtctactgtttacttactttacctctccctgcccttttactaagtctccctcttgcaaaagggaagctatcctcatttgaaaatgtggtggacaaagaacagcagcagctgcttgacaatcacattatatctaaattcacctaattcaagggtgttgctttacatagtcacatacacaaaaatacatttgaacatccacagcaaatgtttaaaaggatgtattatccaatgacagtggggtattttgtggcgaataaggtgggagaaggaaaaaagatgagaatgggaaaagtttggtttttcttattgatacgcttctgtactgtttgaaaatttttaataagatacatatatctgtagatacataatccaccaaaaagccaattaatctaattctcataattttactgtgaattttgtcaaaatttgtttcaatgtggcttacctccagccattcattcagccttgtcactgcagttttgttcacccaacctgtcaatttcatggtttatatttcagatgtctagcatttcttaaatgctcaacgtctgtggaaatgggtgagctttcttttaaatacaatttactgtgttcttatttggcttttgctaattggcaaaatggtatattgtctttctacaaatttacctacagtcaacttggactctcaaaatccacagctaggcggggcacagtggctcacacctgtaaycccggtactttgggaggccgatgcaggtggatcacaaggtcaggagttcaagaccagcctggccagcatggcgaaaccctgtctctattaaaaatacaaaaattaggcatggtggcacacatctgtaatcccagctagtcaggaggctgaggcaggagaattgcttgaacccaggaggtggaggctgcagtgagccaagatcatgccactgcactccagcctgggcaacagagcaagactccatctcagaaaaaaaaaaaaaaaaacccacagctaataggagcagataaattggcttgttatggatctatcaacatcakcagaagcacagtagtttcctcctctcaggagataggtatatccttttagaacagtttatgaaataataacatagtatatgagatattaagctaagaagtttctrcatcaccaagatacaagctcagatttttgctagatttgtctttctttattctgcataaacctattatttactcacattttttctttttaaacatagaacctagaagagaaaaacattgttcaagatgacaaagaggtgatcttgagctcagaggaggagagtttctttgtccaagtgcatgatgtttctccagagcaacctcgaacagtcatcaaagcaccccgcgtcagcactgcacaggatgtcattcagcaggtaaaagcctctcccttcctcacctgagtcctttcctcagcataaattattggaacaaatgtctgtgcactgatggctcattttatgagtgaagttcctcaacaacagggacctcaaaggggagtgtgtgcctcttaaggctgggaaattgcctcacatggtggctcatgcctgtaatcccagttttaggaagctgaggcaggaggattacttgagcacaggagttggaggctgcagtgagctatgactggccactgcactgcagcctggatgacagagtgaggccctgtctctaattgaaaaaaaaaacaaccaacccagtggctcacacctgtaatcccagcagtttgggaggctgaggggggcagatcacttgagctcatgagtttgagaccagcatggctgacatggcaaaaccctgtctttacaaaaagtacaaaaattgctgggcacgggggttcacgcctgtaatcccaacactttgtggggccaaggcgggtggattgcctgaggtcaggagttcgagaccagcctggccaacatggtgaaaccccatctctactaaaaatacaaaaattagctgggcgtggtggcaggcacctgtaatcccagctacttgggaggctgaggcaggagaatcgcttgaacccgggaggcagaggttgcagtgagccgagatcatgccattgcgcgtcagcctgggcaacaagagtgaaacttcgtctaaaaaaaaaaaaagtacaaaaattagccaggcatggtagcatgcacctgtagtccctgctactcaggaggctgagataggaggatcgcttgagcctgggaggcagaggtttgcaatgagccaaaatcgtgccactttactccagcctgggcaacacagccagaccctgtctcaaacaaaaacaaattttaaaagtttaaaatcttggaaatattaattcattccttcaacagacacttagtatctacagtgagtttggatctctataaagcattgataataatggatttaggaagtgactctgcagtgacaatgtcatggtcccagaaatacctaagccagtaggtactgaccayctctcaaggatcctacagaggacaagtaggaggcctactctgatcctctcccctcctctaaatcacgcttctctgagagtttacatggtttcagagaagtttgcttccttcatagccttgttagggtaggccattcatcaaacacctatttgagaagacatacaacacaacaattaagagcacagaccctagatcaagctgtgttagattcaaatcccagctctacttctgagacctggagtaaaagctcagatctgtgccttagttatagtagtgtgctggtaaaccagctctttgtaaaagaaagataaaagcccttatttatttcttttgtgtaaatgcccctaccatatctgatttcaccagactattcccgttggctccagcaaaacactacatggtaagtcaccacatagaccaccacatagacaatatggagatagtatgatagtactttccttgaaggttaagtatatgtaagatgtttaatacaatgcctagcaaatggtaaacattacttaagggttacttgctgttcttactgtatgataacttrgttaatattagccatcttattcaactgactttgaattccaaagggcccagacttacatttctttaacttatctttgtctcccctaaaagtacagcacagtatctgggacataattggccctcactaaacatttaatgaattaacaaatgcatcaatgaaagacattcttatattaaatgaaaagagagatcagttgacttctaaaattctttcaacatccaagactctgtgatagagatagcccagtgggacagagacgctcctgaagagcaagattctattcctcactggctgactttcatgtctgtgagcgctggtacatgcagaaaatctggttcagacctttattgttactattatagctgtatatatcctggaatctacttaacctgtcttaagtataagcttcctcgtctgaaattcaggataataacacctaattcatagactgttgcaaagctaaatgargtaacgtgggaaattacattacaagctacaactatacaactgcaaaatgagttggatgaaatgatctggaagatccccttcatctctagtctgggccatttttccaccttaaagtttcatatagaatgaatgcaaatgttggagattctgtgtctttattcagttgatcataacttacctttcagaccttatgcaaagccaaatattcctacagcatcctgagcaaccccaatccaagcgactatgtgcttttggaagaggtggtgaaagacactaccaacaagaagactaccacaccaaagtcctctcagcgggtccttctggatcaggagtgtgtgtttcaagcccaaagcaagtggaaaggtgcaggaaaattcatccttaagctaaaggagcaggtgcaggtaaagtttaaagttattttgctctgttctwaagttatctgatacccataattacactgtagccagatctggaagctggtgaaatttaggagaaagttcctgagtcaaggaatggagttaggagaaaattgtttggctttgttttcactgtgtgaaaaaacatgtggccgagcttgcggttaagcagtcctagaggggagctcctcagccctactctctccaaagctctagagagaagaggaaagcgctcttctgaaatartgtcatgtgasagaggaacctgagtttaacctaacaccaatggaaggttctttgttcccacaggcatctcgagaagataaaaagaaaggcatttctttcgcaagtgaactcaagaagctcaccaagtcaactaaacagccccgaggacttacatcaccttctcagctcttgacctcagaaagtatccaaaccaaggaggagaaacctgtgggtggcttgtcctccagtgacacaatggattaccgacagtgactaasggcagcatgtttaacccaggtatagtaagtcattgcaccatcctggaacagggcttaacttaaactactttgtaaggaaggcataattagtacaatgtcttttatcttttccaacaggaggatgtcccttgaaggcaggtaggaatgggaccttaaaacaggaaaagggctctgaagatatgtgtaacatgatatgctattgaacaccgcctataaagaaaaagggaaagaggctgggcgtggtggcgcatgcctgtaatcccagcactttgggaggccaaggcaggcagatcacctgaggtcagttcaagaccagcctgaccaacatggagaaaccccgtctctactaaaaatacaaaattagctgggcatggtggtgcatgcctataatcccagctactggggaggctgaggcaggagaatcacttgaacttggaaggcagaggttgcagtgagctgagatcacaccattgcactccagcctgggcaatgagagtgaaaactccgtctcaaaaaaaaaaaaagaaaaawawatatatatatatgtaacttgagcttttgtaattttagaccccttatttattttgtagataaataagcaaagctcccaagaagtcaatcaacttgcccaaagtactctgatagccttatttcatcagacaactgtcttcagtattaatagctgacagaaacattcttcaagggctctatggatcattcagcttttattcttttggatttctcgttttattactgttctaatttaggtttgatgtagcttcaacaacctcatctccttctgcctcaattaaaaaaataaaaatctggcatccgggatgtggttaaaaagaaagcaaaataacataacagcctcaatcttggaaatgcagtaaactgactgcttgatagtcacacaaatttcattctatcttaaagcaaattatttacatgagacctgaataaaagcatgtgagggaaccagtggtaagtctctccttttcgcttagtttcctaatgaacctaagggttcattaaagcccacttttcacctgttccatggtagttcacagatttaaaattcccaagatgaacagcacagtgaaagcattgctgtttatgtgacagagcttcaccatctgcctttatgacaatgaggaacttctgatataaaactgccaaactgcagaaactcacaattaaagaactcagtgatgcctcttcccagagccaaatttkacttaaaacagcccaaaagaaggcccaatacattgagatcatgtttccacatttaaagagcaactcctaaaataactgatgtcctatattacactctgcagtggtcaaaattttaaatattgttttccatatccagaagttagtatcaaataaatcataggtgtgatgttatacacacctctataacttctgtaatgaggtgaaattacactaaagctagtaaattggtcatatacttctctacatataaagagcccgatatgtgctacaagattacttcttaagtacagaagaatacaactccattagaaatttgacttaaaaataatatgcctactataatgaacattgctaattgcttatattttaggagactgggggagggtgattgatagtgatttagatgattgcctttagattctattgtcctgtagcaagtagatatttattttttctgaccaatggattcacatgactttttttttctttttctaagcaagcagatatttagaatcattctgttaacttcacagctttgcttaaagctggggaggcctggccaggcacagtggctcacgcctgtaatcccagcactttgggaggccaaggcgggcagatcacgaggtcaagagattgagaccatcctggccaacatggtgaaaccccgtctctactaaaaatacaacaacagttagctgggcgtggtggtgtgcgcaggtagtcccagctactcgggaggctgaggcaggagaatcgcttgaacccgggagacggaggttgcagtgagccgagattgcgccactgcactccagcctagcgacagagcgagactccgtctcaaaamaaaagctagggaggcttctcttatagtcattggtgcatctatgtgaattgacatcccatgttatgacctcctttacaatggtcttttcaagaaagagcacttgtaaaagaaaagaagagctcataagaaaagaagtttagagtttaggaccaggcacagtggctcatgcctgtaatcccagcactgtgggaggccgaggtgtgtggatcacttgaggtcaggagttcgagaccagcctggccaacatggtgaaaccccatctctaccaaaaaatataaaaattcctgtagtcccagctactcaggaggctgaggcaggagaattgcttgaactttggaggcagcagtccagccagacaagagggagagagagcaaaaagaaagttagtttagtattgtttccactttttaggtaacatatttcatatttgttctaaaatgatcccttttaaagtttcaataatctacagatttttaaagaacatattcatctatctgaagtagtagttagctgaaggaattccaccttttcttaaagttgaacagtttatttgatgtgatcttttttaaaaaaayaaactttctaaagaatgtgaaatatttatttccaaggcagaaataacctaatgttctacttcctagaaacatcatgttctaacattgtgagtacagaggaaacagtctcttccccaaacctagccactagagctgtggctggaaaactctgaacccttggtataccgcaagtgtttctgtttcttcattttcagtatactaataagcctctgtatacaacattacaggtgaagatctttaagcaagaagttaaagagtgaacatggtggaaaaaatataattattttcatcagacttaaactggaaattgatgatttctgaactgaagccttcacacatgtgagatccatgctgaggagaagcaaaatggcacagggctagttgccaccaaccaatttactgatgaatgaagcccaggggactgccattttataaatgtcagcagttggaaaaatcgtcacgaattgacttagagcaagggtcagcaagcttgtctgtaaagggccaaacagtaaatattttagggctgggggccataaaatatgttgcaaccacccaattctgccattgtagtgcaaaagcagccatagacaacacatacatgaacgaacgtggctgtattccaataaaactttatttatggacactgaaattggaatttcatatatttttcacatgtcacaaatactcttgttttgactttttttcaaccatttaaaaacttaaaaactattcttaattcaggggccatacaaaaacaggtggcaggctagatttggcccaaggaccttaatttgccaacacaactaagagaagagaactgggaacaaggagcacaaagatctgaaaacaggaaaggaagtttagccatacattttatggccgagaattagaagcttagaattagaagctttggggcatttcaagtgtaaatatgtcctataacataagagtcattaaaattcaatttagttcctgtattgtgtaccacagtgcactcctctttaggatttttttacatatagaaataatattgggttttttttaaggttattgcctattcagttaatagggttgctttaaaaaaggttattgcttaatcatagattagattactcatttttggttttcaaaatgaatttagaatgacgtataatttaatatctactgaattgcaatgtcttaacaagaaacctaacaattttttaaagcaaaagtagattgagttggcgtttaaatttattttgcaaggtttgtactgacactatacttatatatttattatacatcgctctcttgatattgccatggattagaagcattagttctcagtacttgaagacaaacttctaaaaagaaaatatatgctctgaacatctgaaatgggctagactttcaagtaaaattgcttcatttctcattaactgaagagctattgatccaagtcatacttgccatttaatgtaaattatttttaaactttgctgtacaaaaccattaagtgtaaaggattcttcatattcttagtatgaagcaaattatgaattttaaaaatgaaatatgtattcctctaaaacccaaacttttatctttccattggtatctttgaattttaagacacttttcttcaaattacaaaacactaaaactcactcctaaacttcactttgagaaacttttttaaccaattataaaaataaaaccatccccatgtgtttcttgcatattctaaaaacagaagtgttaaaaatacaccacacaggctgggcagagtggctcacgcctgtaactccagcactttgggaggccaagatgggcggatcaggacagagaatgaggccatcctggccaacatggtgaaacccaatctctactaaaagtacaaaaattagctgggcgtggtggcacgtgcctgtaatcccagctactcgggaggctgaggcaggagaatcacttgaacctgggaggtggaggctgcagtgagccaagatcgcaccaccacgctccagcctggtgacagagcgagactccgtctcaaaaaaaaaaaaaaaaaaaaaaaaaaaaaaaaaaacaccatacagctttcatgtcattgaaagttcttactgggtcaaagccttaaggctagaactaccattttcttgtcaacagaattcaggctattccagtttgatgtaatctatacagtagtacagttttaagtcaaatattcattctaacaaatgcacaatgctgctccattttaaaaatattccggaaacactttatcaagcctctataagtgaacatgccaaacagtttgccctaccacgtgttgaaaactgagttgctggtctaagtggctagaggccaaatgaaaactgtgcagagtaacaagatgaaaagactcgtctctttaggtttatcacatttgattctgatgctaagcgctgccccactcctcctccatgacctttaacacaggtgtatgttttacaacataaatctgagactgaagttgagaccaggttgtttagcaagtgagagaatccagcctactgcctaggttgcatcccaatttagttgtttatcacattttgaggtgaaagtacatacttcattgtatttgagtctttgggattacagaaagaacacattgtttyaaaatgtaaagagttggctgggcacagtggctcatgcctgtaatcccaacactctgggaggctgaggtgggtggatcacctgaggtctggagttcgaggccaacatggtgaaacccgtctctactaaaaatacaaaaattagctgggtactaaaaatacaaaaattagtggtggtgggcacctgtaaatcccagctattggggaggctgaggcaggagagaattgcctgaactcaagacgcagaggttgcagtgagtggagactgtgccactgcactccagcctgggtacaagagtgagactccatctcaaaaaaaaaaaaaaaaagtaaagagtctagtctactattatacacaaatggccagcacaatctgatgttggctgaaaatatttaagttttatttaaagctttctgaattaaacagctatattatgccaagtgaaagaaattatcctaaatagccactatgactatacccattaccatttcacactttttaggccaccagaaatctgggtagcaaactcttctcattaaagttgatgtggacaagaatctaaatatgcaagttggggtcattacaaaattttaagaagcatcactgaaagtgaagagaaaggagcatgaattctgtcactctattcagtgatgccaaatctgtaggaatgatcctatctgggtagaaagtgccctttgaggggtaaagcttcttttcatgtcatcattagcaagtaaaagttatttacaaattctccagttgggagtcaatatgaagtctagactcaacaaaagttgagttacaagtgacttgtttttaatcaaacttgctttcttttatgggaggcttttatgcctcccatctcaatacctctggagacactggaagctcattaatgaaagtgggccctctatgatatgtatcaatttaccttttgctaactacatcgtccccttcctttcttctctcctcttccaatatctctatagacttctgtcctctgcccagagacccacaggccttgcttaattctggaaagttatcagggcttgcttactggcccaataaaattgaattaactctaaaacacaaaactccacatctatgctcccatgctagtaaagaagagtaggattttcctggctggtgtctttgatcttacattggcagcctgcagggaaagtgctctcatggtgaaagtctctgaccccttttcagttgcttatatatcagcagtgaggccagaaaagatatacctgggaccccaaaaaagttagagagaaaagggagattgtctcttatacagagtctagacttgggtcaatattccccatgatccattgttaataatttatgtgttctctgccatccttatgtagcagcttcctaaaagcaatccttggctgatggctatggattctgacataggaatacctgaaatgagtccctttgaaacacatactgagtctctatgattaccaagttattcttttttttttttttttttttgaggcaaagtctcactctgttgcccagcctggagtgcagtggtacgatctcgactcaccacaacctccacctcccaggttcaagtgattctcctgcctcagcctcccaagtagctgggactacaggtgtgcgccatgtccgtctaattttttttattttcagtagagacgggggtttcactatgttggtaaggctggtctcgaactcctgacctcgtgatccacccgcctcagcctcccaaagtgctgggattacaggcgtgagccaccacacctggcctacctactcttatacatctcttagattcaaaacatactatgcacaagcctgtcaccaaacagatctctgaaaccttccctattgcagatgacataggtctctaaacttttgacacaagtaattctaacactgaattgggtactgtcgcatttttcaaaagcgttatgtggatgatttgactcagcatggaagactgaggttgtcttacacccattatttcccaccccactcttaagtgccagcatagtgctaaacacacagtaggtgctcattatttgtctagttaaaaaacaaattaaggctgtagcttaatatagcctcaggatatgtgtgtgcctgtgtgtgtgtgtgtgtgtgtgtgtgtgtgtgtgtgtgtgtttaaacataagcttacatataagcgtatgtaagttaatgcacaaatatatttcctcaaattcacataggatactcaaatatagatgtataattttgtagtcccactgtgattctccatatgtataacaagaaaattaaaggcataatacagctgtgaaatagctgatgagtttctattttaagctgatttttcaccagaagtatagtttctgctgccaaagtaaagtataaatgtatttgtatatgtgtggaaaataaataatttgtgacatgtattggtcacttgtgctctgatggggattagaccctttggttatccacacaaatatttatcactttcctggactttgttttatacctaaaaggtggactaaaagcaaatattcatatgctgaatcatacctttctcattaaataatcaagccttaaaaaatgtgacctcagaaccacttttaaaaatcatatataatatgctaaaagactgacatacactgttaagctcatatcctctcactctgctggaatggtaaaggaattttctactttcgtttacttcatgtgaaaaaagaactctaagctccagagtaaaataactggctgctatgactttcaaacagtaagagatctctttagttggactgctgtgcttttttcaaaaaattatcatatcacaagaataggaagcagaaaaaaacagctgttttattcaactattcacaatagagaatatttataatctagtcactgaaacacgcatttcttaggccactcctagaatatgggaatagctgttacataaaatactgttttataattatattaataagaaaaagcattttacctgttccaagaggggaaaaaagctcctcattgagtatcctttgtctctagatcagaatggtaaagtcttgggcctggttcttctaccctggagcaattcttccccagtcaccctccagggaatgtcagaaaacgtgaagaactttagagactagaatcatattcaaactttccttgaaagtagctataataaacactaacaccttttttaaaaggccaaattaggtaacttctttaggtggatcatccagcaaaagccaatgaacctgaatacaagctatttttttcttttctcaaatatcttcataaaaatatattaactcaaatttagaatgcttctcatttccatccacagtattgaaataaaaatatttaaagagtatttagttataaaaagtagctaaatggtaaaatgtcttctcatggtcttgatttttctgtgctctatgccctaattttaatatagcaactgcacttcagtaagatccagtccaaagatttttttaaaaaactataatgtacgtgaagcttttaaaaggcagcatcatcaagaaagtaatttccaaatactggggagaaaaaaaggcttttgatctccttgatggaatgacatattcagaataggggcagaaccctgtgccatgcaaagggtcattcttcctcttcttcctagacattcttaggaagctttccttgtataaaaagaaaagatcctaagttaacaactcatctttatgtacatctgcacacacaaatatacaagaaagtccactgacttcattcctctactagtgtagtgatgttttcaaatatttcgtgaaatccagaggcgattcagtagcaacttcactggagtatcttttgattagctgatttaaatcttcattcaaaaatgaatccccttgtaaaaatttaccctaggaaaatatttaaagtatgagttagaagttacttatgctataagctaaagccaacctgtgaaccaagttgaaaatggcaacagctgacaccaacacatgcaacacaatgacagatgcttggtaaggtcttggacatatcctatattgaacgaacagtttcatgatcatctctatagaatttcaacctcagaaatccatcctatgatgaaatcctaaacattaaaaaaaaaactacctataaaataattaagcaaactggagttagagttattgagatacattggtttctatttcttcctttaaaaaaatgaaaaatatcccatacctttattttggggtttgaagattcaacaggaggattgaatgtcatttctgccatgctatatgcctcaaaaagttcagtagcagatctaaatcacaaacacaaaaaatgtaaagataccaccacatctgtgtaactcaaaaataattagattatactcagagaatgattcattcttaacccatatattaaggtataagatttga

SEQ ID NO: 6786 - DNA, 29282 bp, Homo sapiens
tttccattttatttctgttctcatctaccccagctgtcttaatacctccactaaccaccacctcctacctcctaccaatccagtagcttctcctgtctgcaacaggccaatcttcccacaaccatctcgctaagtgacattgggactgtagtgttgaagtgaatgggaaagaggcaagaggagcctgaggaagcgacagatgaatggtctgtagacaaagagatagttacatgcaagatatgagacttacagtcaatgtattatggaatggttgcatctgtgtgtgtcccgagacttcattttcacactgacttgtgttggtctccctctgaaactttatttaaactttattttttcaatcaaactatttttgagcaccagctatatgctatgttctagcacacaagagagagaaaaaaaaatttttaaagatcattgaccacagaaactcacagtctagttacaccgaaccaaaattacaatggagcccttttcctagcatttttttccatttgatgtattatgaaagtaatatataacattgcaaagccctgtaaaaatgttaacacgtaaaaaaatgtttaaaatggcatatgatatataaatgtatctaagtagaaaatgttttcctctagaccaatacattaaaaaaatttattgtaagattgtaatttttttcaaaattatttattgaataccttctaagagtcaggcactgtcgtagacactgtgaatataatagtgcatatggtagaccaggatccacgccctcatggatcttacattctagtgataataaatatagttttttttggaaatatctatagtatgtaagagagtgaaaagttatattaaggagaaactacaccatggaaggaagatggggcaaaggggtgttaggtaatgcgttccagtttaaaactgaatgtggctgggtgcagtggctcatgcctgtagtcccagcactttgggaggccaaggtgggcagatcacctaagatcaggagtttgagaccagcctgggcaacatggtgaaaccccatctctactaaaaatacaagcagaattagccaggcgtggtggtgcatgcctgtagtcccagctacgggggaggctgaggcaggagaatcgcttgaacccaggaagcagaggttgcagtgaactgagatcgtgccaccatactccagcctggacaagaaagcaagaccctgtctcaatcaatcaatcaataaaactgagtggccaggaaggacctccttgaaaatgtgacttttatatacagatctgaagtaaatgattctgtgaatcatatggacatctggggaaagagtgttcgtaatattcaagccaagtacagataaattttgacttgttttccatttaacacatgtcacgattgtttcattttattttaaattttataagaaaaagcataatctgtcaacacatgaatttaattatgacatgtttggtttggggattaaatatatattaaaatgtaaattaaaatttaaatacacattaagcactattttaaaaagcaaaaattgtttgcggcatctgatatttggtatttttgcattctgtacttttaaaaaaaaacaggtttcagattcttatttgcaagtgcatttctgcaagcaacagcttgtgaggggaaagtcttaatccccaaaaaataaaaattcaaattggaaataatcatcaatatggcttctttttatattgggttttgaagcactggttttatcttgaaggtcaacataagacatttgatcatgtgactaatggctctcgtgaagttcatattgaggtgaatttagagacttcgcatcctttctatgtccctattaatttattggattacaaaaccmggtttccttgtatttcacagaattcatcaagcttattatagatttaaattaatcaatatatgacctataattcaaaagcacacacatgagcctaagctgtataatggtcatttaccaccacaaagtgcgtagcagggctcagctggattaaaaaaccactggcattactgactccaggtcatggtttccagatcttcaataactgcccctcataatcatcaatctgcatttggaaactctccagtgagtctattttaaagagaagaaagggttgaatttttttactatgtgacacattaaataattatcttaccactgtctagacaccactaccgaatttaacactgaaccacctttgggaaactcaagttgggaaatgctgcagttcagcaacttgatggcaaagcaagagctattgtggaagttactgctggactcaatggagtcagagaggaggaacccatacccagtgaagccttccaagagtttgtctaaaaggtaagtaagaaataggccagttaaagaagaggaaggagcatctccacaaaaagcacagagccataaaggggcttaacgggtttaaggaacagtctgtggttcagcgtagtgagtctagatgtgaatcagggaaagataagggaagaggatggcagattcccaagaacctcgtatgccaagcaaaaagtttggattttatccagaagtggtggggagccaccaaaaggtttcattatggctataaagtacttcaactgatgtgttagaaaaatcactgggcctaggagggtaaggactagataccaataatatcttgtttttattctaacacctatgcaatatgatttacaagacttagggtgatctagagagcctttgctaaaataaggctttcctcctttttttctatcctcctgcatattccagttagaagaaagcattctctttatgcattcttgcttaaaaatcactaaaatcaccaaaatagtgcaataagtattatcagtttttaagatctttatgaattatatcatttttctcctaaagggaagccagtgatgtagatgggaaaagggacagtttgcagaggcatggtaatgagtagcccatcctgaaagaatggtcaattttgtgtcataagaagaagacagcaggccgagaattcctgaaagatatcagaaactgtgaagagtccaaaatgttaccctacattcaagctaacaacttaacgtgctgtaatttcaaggatgcaggcagaagacctaagactcctgggccagagacaaagggcattttacccactgcaatagcaatagccacagtattatcactttcttgtttctttccttgactcccagttcctacaggacaacacaacaagggccaggtaatacctgctgatgcagtcggttgagttgcaggagaggaaccccgagtttaggaaacccccatcttttataataggcagcaaacaaagtgtccactgtttgctctagagggagacattatctctgaacccaaggcaccttactacaaagagatgtctgaaaagatggtccagaacaaaacactcttcctaaagacatgctgaaaggctggagatccataaattatatcacaacaggagctaactgtgtgtccttaatcaagttatttgtctttattgagcttgtttccttacggataaattaaggagatcattaaccaactcataggatagtctgaaataaaatattatttcaaactcaaaaccagcaaaatggtgagctttttatttttgtattatgtttgagcgttttctgataacactgctaaaaatgtaagtttcttctcaccaaatattgcactaataagccacaaccaataaaaacataggtgattccaacccagaaaacttaaatgttaacctctgaaattaataagatatagaaagttaattaattgtgtctgtaacctagcaattgtacttagtgattccttttctgtctttttaaatccttgttcctaaaatgttctttgagcttgctcatttgttttctcagtggtggcctcattagggaattatttaaaaattttacagatgctaacatataaatttgtatgaaaagtttgattgtaagtttcttatgagcattaaataatatataaactatctggaggtatctagagaatagtgagcattcaataaatattagttctttcctataattttaacatcctacaacttaggtgccataaatcataccaagattaacgttttgtaattaaaatcataaagccatatttttctaaaagttttaaaataatgaccattttcaccagtttccgtatattttcagaatcaaggtaattgattgtaatgactcgtgaaaaataatactttaaggccaccattagctaagacagatttataactagagcattatttttaattatctctatcttcacattcccttttcaggaggctggtatctctctttcccacgtaagtccatctcttcagtttcagggatggagagaggaagatgtaaccttggaagcggaaggacacaatttataggataatcccactcatgacaaaagaggaaggtaaacatgtctgctcccccgaccccggttgtttgtgggggaaagaggagtataccagtttgttttcacactgctgataaagacataaccgagactagataatttataaagaaaaagaggttgaatggactaacagttccacatggctggggaggtctcacaatcatggcagcaggcaagagagaatgagagtcaagtgaaaggggaaaccccttataaaaacatcagatcccgtgagagttattcactaccacgagaatagtgtgggggaaactgctcccatgattcaattatcactcaccacatccctcccacaacatgcgcaacatgcggagattatgggagctacaattcaagatgagatttaggtggggacacaggcaaaccgtatcaaggaattacagagttaagagtgggaggcagttggatgcctgtgttgctatctgcagtgcagggcttgaagcctaggcaccaagagggggccggttagattggttgaaagggacatggagaccagaagggcttctttccagttccttctttgtggggaacattgggatcagagagggttctaagctcatttcagaagccccaacatacttaaatgaacatggctagaaaaactgaagattgaatttactaatcattccttgcttctcatttgtctcaggattaaggtgaaagctaaagaacctattcttgagcctagtatggtccacgtagggtggcctcacagcaaagcctttggggtggtggacatgagccaggggcagatgacagatgtggcagtgactcagaggagtcttcaaaacccatgaaggctaaggggaagccaagtcattagggcggatcctccagggtccagagacactagaaaagcatagactacgaatgagtttatccaccatagatgtcaacaacagctatcaataggctccctaggatcagaactggctgaggcaagcttcagttgagctccgttcgcatcggtcaccacacgctcccctcccaactccagaaagcctgtggcccctcccatgctttggctgccatcttggaaaggagggcgacaaggtagagcaatctgaaacacagagcagttgtccaaagaatcgagttaaggcccccaaaacagataaaattatcttgtcttgctgtgattcagattaaactaagacttcttttcctgtttactcaagatgtagacacttgatgagaaactggtctggagaaatctaggagctatattgtctttggacatccatattagaggatgagtaaatttgtaatcccattaagtattttttgagctttccaacagttttaattattattgggaaataaatcagagaagtctctaaagcaacaaagaattattgaggtttcgtttgtttggggattttaaggtctagtactgtggtattttttgataaagcatcagctgtaatagctttgtagtacagttatcaaattaaataaaaagggatgtaagtagtcataaaaattgctcattaaagctgatcgcctttttttaaatgccaccaaagctttggagggtggagaataacccagttgaaaatctacaagcaatgctgtccacatcccaaatagactggtcaaaaagccttcatcccgtcagtcactgacatcaacttcatccaaatcagactcctaaaaacccggcctaacttatgtgtcatgcaaaggatggctcttggaaaaatgcaaaggtatgtcgtaatttagaacccggtcatttgaaaacttgattataaggtaaaatatgcagaagctttaggaaaggtataaaaatgtcatgcaaatagggtactgggttggggaagagctgagatcaaataaaattttctcataaagtgtgctgctatattttcatgaactgagaggcatggagatggtgacagtgaaggcacagggcctaacgccacacagctggtctagaatccagctttccctcttcctgaccttcagaaagtcactcaacctcttagtgaatgtccggattttctcatttgtaaataggaacaatattagtactgacttcactggttgctgtaagaatcaagtgttaagatgtatcaagtgctcagaagactgcctagcatgtacttatgtaagtttcagctgtcattatcgttctttcattaatatttttaggctgggcgcagtagctcacacctataattccagcactttgggaggccgaggcgggtggattgcctgagctcgggagttcgagaccagcctgggcaacatggcaaaattctgtctctacgaaaaatacaaaaaattagctgggtgttatggcacctgtctgtggtcccagctacttgggaggatgaggagggaggactgcttgagcccaagagacagaggttgcagtgagatgagatcacaccactgcactccagcctgggtgacagagtgagaccccagctcaaaaaataaaataaagaagaaaaagaaggtgtagttgcaacagtgaaatactgtatctgaaacatgggccacaatttttaaaaaatatataaataaaaaatagtattttacaatgacaccacaactaatatgtgtgagtcacaggtgcctgccctcacagtgttctcaatctaataactggcatgaattagacggtacatccttggatgttttccagctaccagatcgataggttgtaacatgaatatgaattgtgttttaaatctaaattgcaacacgtgttgagaaaattgaaaaaactaggttgccttcatactgtcttctgagaagacccaagttttgagcagtgatttctctaagggaagaggtgaaaggaattagagaaagaggaaagaaagagaagatgggaacacttagtatgtcttttcaaagatcaatctcttcaaaggttggcaataggcaagtaagatgttgggcagacaagcttgcaaatggcaagctccgtagctgtctaaaatgcttggaaaattgagaatctcaagcaggttaagaattatccttttttagaacacatggaaaaagtgggaaaaaaatacttttccttttgctcttgttatcaacacaattagcaaaccatttagaactttagcaaaccatttagagcttaagagaaacaagaaaaagttcaaactggcccatctttatattacaacaaaccttgaggtcacatttatttatacttgacccaacagctatggttcctgaaatacatcttctgagagctataatgtgacattcttccagaatgatcaagtaacaatggtcttctcctgattcacttaaggaaaaagatgtaacaaatttgtgcatagaattctctcatttaagttcttcttccatacattttctttactgtttgttgcttatgactgttcacctgataacaaatggcagtgcaattaaatcattcaataagtgagtgaaagttaatgaaaaacctgaaaactgaccgggctcagcttgtttattttcgtggacatgtgggctatgattttacagagcacatatgttatattgttctatttctgtgtcycacttgtccacttggcataaccacacatgctggtatttcatagggttgcacatcccataacgttcaggagctcagacatatgaacaagtctgaagctacgacagtatatgctcttgatgctttaatacaatctgagagcctrtgtttccatgcscaagggctctcctgccaactttgcagcctatttgagaagctgcaggaygataagcaaccattagcatcagctgtgctatttgtgatccaaagagactcatccaccgggaacaggaccgagaacactgtatcccagaacattgcatccttggtcttgaaatgaacagcagcttgatttgwttgcaaagcacagtggaagaatttggaaaagcatattgtagcttgaattccatggggtctgtccaccttcctaaaacccttttaattattagggaggcattaccaaagttggaatgatctgcagtatatggcaygtcaaacaagaaagcttagcttccacatctacgtggtaaccttggggaaattattaaaccatgctcagtgaaatgcaaggggaagctgataatgatgcctgtcccacacatactgtacagggatttggaggaggagaaggaaataatttctgtactaaaaatctccagcctcaacagcttgggacaacaaaacaagattatacttgctaatttccagaaatttgcctgcctcaaagaggcccccagtttctagggcatttcccaggaaccttcctctaaaactgcatgctattgataacacgaaagcagaaccaagaccaagttcaggctttgccaaggctttatgatattcagaataacttaagagtgagaaccagctattcaaagagcctgtaaacctaaactgactttgggtgttgtctctcactttttgattccaaccgctcctgattttctgtcttcttcttaactaagacttactgagtgctgttaagtwttcaatggataagctatgtctcaacttttcaataccttgttgcggtggctccgcctgcagtcccagcactttgggaggctgaggcaggaggattgtttaaagccaggagtttaagaccagcctaggcaatatagtgagaccctgcctgcacaaaaaaattttaaaaaattcaccaggcttaatggtgtgctcctgtagcccagctacttaggaggctaaggtgggaggatcacttgagcctgagaggtcgaggctgcagtgagaaatgatggtgccactgcactccagccaggatgacagagtgactgacactcagccaaaaaaaaaaaaaaaagtatgcaccaggaagacaaaatataatgccttattcactaacgcatgttgaagtatatgtacatatatacacagaattgtaggcctgtacctatttctaagccatatcctgtacatgatgtggtttcaacattccagaaacctagaagtccacaatcctgctcagccttgtcttcagtttctgatcttgaacagtctttcaaagaccacagccatgagaaggtcaactagagcatctaaagaagcaaaagttatgagtctcaagtctatggctaatttacttcaaagcctgatcttcagagaaagatatgagaataaggaaagatttctaatgtgttattctattgtgttttatcattttgcacctttttttcttgtttctcatctgtcttactcactttggtctataagctgtgtgagaacagaaaatataactatcttagggcaggcgtggcagatcacacctgtaatgccagcactttgggaggccaaggcgggcagatcacttgaggtcaggagttcaagaccagcctggccaacatggcaaaacctcatctcaattaaaactacaaaaattacccgggcatcatggcacacacctgtaatcccagctactcaggggctgaggcaggagaattgcttgaacccaggagacagaggttgcagtgagttgagatcatgccactgcactccagcctacatgacaaagtgagactctgtctcaatttaaaaaaaaaaaaaaaagaaaaaatataactattttgctcattaatgtgtacccagaaattaggtctagcccgtagtgggcagtcagacaatcttactaaaatgactgactggtctaggggagaagggaatagaaagaaaaattagtccactgatacagtttggctgtgtccccagccaaatctcacgttgaattgtagttcccataatccccacatgttgtgggagggacctgctaggagacaatttaatcatggggtgattatcctaatggtgttctcctgatagtgagttctcacgggatctgatggttttataaggggcttttccccccttttgctcagcacttctcctgctgccaccaggtccagaagggcatgtttgcttccccttccgctatgattgtaagtttactgaggcctcctaagctatgctgaactgtgcatcaattaaacctctttccttcataaattaccaagtctcaatatgtctttattagcagcgtgagaacagactaacacatccacccatggaataagagggagatgagtaaactagctaggaggttagcgagcacaaatgcgggaaccattctgcagcatggccacttgagtagcaagataatgctgggagggtggaagaaggagaacttgggactgggaaaccattgatggctgagcacagtggctcacatctgcaatcccagcactatgggaggctgaggcaggagtatggattgaggccaggagtttgagaccagcctgggcaacatatagtgagacccacgactctacaaaaaaatttaaaaattagtcagacatggtggcatgcacctgtagtcacagctactcaggggactgaggcaggaggaccccttaagcccaggagtttgaggccgtagtgaactagagtcacgccactaccctcaagcctggggtgaggctctgtctcaaaaatgcttgttttttgttttttttaatttttaaaaagagagaaaattagggcattttctaggtaaatagtaaggagataagcttagtgacttttctgccctcacaaagccagttagcaggcaatgtagagaagaaagcggaccacctaagtcctggttaactaccttttttctcagaagcargggccgctaagggagagatgtgaaggtcaaggaagctctgagctcctgacagccgcccttccagccttctcctgccttccatagagagatgctatggactcttggtccagagactcaaattcaaggaaaagaagaggcaacatktgcagtgttgatccttgagttgaacaaaggtgagagataagggaagagggtcacaggggctgggtgagaagtaatgtggagagggtgtgatgctggcgagttggaagggacagtggttggggaaggttctgggcttccggaaagagcaactgtgccgcgttgtcagtgtagcagctggagagtgtgggaggactttagggagaccrcagagggggagttataggaaacacagcagcactgggaagctgttgcctgctatgcagcaaggccatgaggccctgggccctccagccagtccctgatcatgagtttgcggccttgttaggccctggccgcgatgcctcatgatcctgctgatgtttctgccttctctccagccagcagccagcccctctcaggggcttctcactccactccatcagaagcatacctcaagcacccatttgcatggtctcctttttaattcccaaagttcaaaatctccacctccgtatcttgtgccactctagcagttgctgcttaccctaaagccagcaaattacartgacaagaacagaatttctcttatgcttaaaaaaaacttaaataaagtctatacaatataagggtgagagaaggtggcatttccacagacttagataataggtgccctatgacagaatgatcctctaatctatcctggaagctacaaattctacttgcaaagtgatctgtaaccaccttggcccacctgaaggtgacagtccagaaatgcagctcaattttgtggtaatcctgaggtcacaaataagctgtttttgtgcatgcgactgtatcctttggtgtttgctctatttgtaaactgtgtcagtakgatcgcttgtagcatcttggaattatctggaaatatttttcagagcaacctcagaatgcttttcacaaatgtcattcccttattctttgaggactttcattgagaagactcttaggggctggcataaagtaaaatccattcttttcttcaaagcacttcctagttccaggagattctctttgcacgtawacagactctccttcccttccaggtagaagctgtctccgtggtttcctctctgcacccactattctgagcccatttcctcctgggactgtcccttcctgggactgtcctttcctggctccttggatctgtcaccccctggccacacttctattctttccctttgcttgaacagtatcagatggggaatatttttttcttttatgttgttgtttgtttgttgatccaaggtctcactctgtcacccaggctggagtgcagtggcactatcatggctcactacagcctctacctcctgggctcaagtggccctcccacctcaacctcccaagcacctaggatcacaggcaggcactgccacgcctggctaattttttttttttttgtagagacagggtttcactatgctgcccaggctggtctcaaacccctcggctcaagtgatttacccacctcagcctacccaagtgctaggattacaagtgtgagccaccgcacctggcccagatggggaagacttcatcaaatattctctcctccgttttttctccttgacttcctaaaaactaaaacatgaaaaatataagtccaaagtgaaattctggactaatttttcagagctcctagtcactaggagacagctgcttcaacattttaaatgtattaccttatttcagaaaagcaaacattataactttaagcaggaacacccctgagttgcttggcatcatttttaaaatctgatttaaaactacttgatgagccaaatgttgtgttatgtggacttaggttctgtcttttttatgctcagtcctcaatattcagtgagaatccatgaaaagaagataaatgaggacatgtctttgagaaaatacaacatttaaagacagaaaaatgtaaaatataaagactgagagggaccatatagagggtcaggaggaaagacagaggatgtggtttccagatgcgtggcatcccttactcaacatcacatacaaatactaactcaaatatctaaatgacagagctaactgtattagtccattttcatactgctgataaagacataaccaagactgggtaatttataaagaaaaagaggtttaatggactcacagttccacatggctagggaagcctcataatcatagcagaaggcaaaaggcatgtcttacatggcagcaggcaagagagaaaatgagagccaagtgaaaggggtttacccttatataatcgtcagctctcatgagacttactcactaccaagagaacagtatgggggaatccacccccataattcagttatctcccaccaggtccctcccacaacacatgggaattatgggagctacaattcaagatgagatttgggtggggacacagccaaaccttatcactaacactataaatctcctataagaaaatataagagtaaatctttatgagattgagcaatggtttctagatatggcaccaaaagcacatgcaatgaaagaaagacagataagttggacatcatcagaattaacacttttgtagttcaaaagataccaccaagaatgtgaaaggcaacccagaggatgggaaaaatctcttggacatcttatttttgataagggacaggtatatggattatacaaagaattcctgcaacaataaaaacacaacccaatttaagaatgaataaacaatctgaatagacatttcttcaaagaggttttacaaatggccaataaacacataaaagattcccaacatcattagttgttagggaaatgcaaatcaaaacctaaatgagatatgactccacatctactaagatggctcaaatcaaaaagccagataataatgagtgtaggcaaggctgtggagaaatcggaacccacaaacattgctcgtgaaagtgtaaaatagtgcagccactttggaaaacattgtatagttcttcaaatggttaaacagagttaccatatgaactaaatttcactcctaggtacgtacccaagaaaaataaaaacacatgtgcatacaaaaacttgtgaacaaatattcatggcagaactattcatactagcaaataagtagaaacaacacaaatattcaccaatgaattaatggacaaataaaatgtggtataacaatacaatggaatactgtttgacaataagaaggaattaagtactaacacatgcaacaccatggataaaccttgaaaacattatgctaagtgaaagaagccagtcacaaggatcacatattagctcatttgtgtgaaatattcacaataggtaaatccatagagacagagagtaggctgatggccgcttggggctgacagtctcaacagtgatgaggagagactgctaatgggtatggatggtgaaaaatgtactaaaattgattgcagtcatatttgcaaaattctggataggctaaagaccattgtattttatactttaaatgggtcgattttatgataggtaaattatattttaataaaactgttatagaagaaagaatggtggaatcgtcaagtaagttaaagttggcttcaaatactaggaagttaaacattaaaaactgcccaatgaatttcatgcacagatctcagtgatgacctcactgagagctattttgattgataaactggcgaggatgtagaagccagtttggagtagaataagtagttagtgggaggtttcaaaaaaaaaaaagggtggagaaagcaacaaatcaggaaacgttttcattcaagaaatttggctgtgaaaaagaaaaagaatattagctggatgagataagaggtcaatgagaacaaaagaagaggcctagagcacgtttaataaatgcggctgggcatggtggctcacacctggaattccagcacctggggaggccaagacaagtagactgcttgagcccaggagttcaagaccaacctaagcaacatggcgagtaaaacaacaaaatatatatataaataatgaatgctgcagactgagggaccaagttgatcagagaaacgtaacagaattattaagcaatgtcagagacatgttttaagaaggatgaattttaatgatatttaatttgccatttgttgcaaccttctccagcatggctcagctgcccatatacaggtgacagtacagagggcgtaagagtcttacaagataaatggcataagtcagtcatggaatttatttacaagattgttatgagaagaggtgaagtaagaaaaaccgctcgactgtgagagaataaagttctcagtggattctgagataaatgttctctcactccatagcatttatcatttatttacttttaattcttttttttttttttttaaagaagatgtggtctcgccattttgcccaggctggtctcaaactcttgagctcaggcaatctgcttgccttagcttcccaaagtgctgggattccaggtgcgagcctgactgggagacaatgaagttctcagtggattcatgtggatgagattaaagaacagtcattgcaggagtagttgaacaagtaggctggaagacaaggagcctgagatgcgaagtagaatgcttgaaattaatgactgtagaggtggagcagtttcagatgatagagagcacatatcactgagttggggtgggtgcacagaagaggaatccattggaaatttaaattattagcagtaagaagttggaatgttggaagggccattcacacgttggattcactcaggatagctatggtgtttggatggaaaagaatgactgcaaatcaatgggcagagtctcagatgactgagtgagagtaggggttggtgcatgacagtgaccgaggaagagagggtggtggggtaaaccatcaggagttccaaagtggcaggactttttttttgtttcctttcttactaaacagagtggtcaggagaagaaaccaacaagaaatgtaacctacctcyagaactcaggaactcaggtacccttaaggrtatcagaaacaatgaaatatggattggcagaagcatcttcaccaccatcttcagatgtaattaatgcagctgttgaatttggttgactatccacctataattaccacattgcccattacagatttttgctgccttttcttgcctccttttcatttttacatccacttattccctacagaaatgacagataatcagcatttttgttttcttgttatgttgtcctgatagtacagctacaaatggatttgatgtgctgaataatggtctactaggcctaaaaatgaaagtctagacccttagtcaaaaataacttggatctatgtggtaccaagaaaagaggaattataagaaaaagaatattagtttaatgttctgtaaatttttttcttaacctattctgtccagtatttactacttggctgcattcctaaaacataaatttcacaggggcaggagtctttgtccattttgctcattaatgtgttaggaatactaaaaagagtgtctagcggggtagtcacataataaatacctgttgcatgaacaaatgggctcttatcggcagcattttgttgagttcctaacattagcggtacactggcactgtcctgagtgaaattaaagacagaattttcacaaatagaagcatgttagaagaatcacctaacaataagacaatctacactctatgaaagcagaacacaacccaccagagggaatgagaaaaaggaaggggtggaaccsagccaaggaatcttttgccaaggggagaaaaaaaaaaaaaaataaaggccagagaagaaaatgcagcaggtgcgcacaggtttgacacctggtcgaccacagtatctcccaaagtgccacattccaataggcttttggagaaccatggtcaaatacatctgtgaaatgatcatctaaccaaagtttaaaacgtccctttttactacaccactttttgaccctttgccaaagggttttgtaactttccaacaggggtcgttgatgacagaattatatgtatatatgtatgtctgtgtagaattttctcttttttttttccagatggagtctcgctccgtcacccaggttggagtgcactggcacaatctcggctcactgcaacctccgcctcctgggttcaagtgattcttttgcctcagtctcttcagtagcaggggttacaggcacgcaccatcatgcccagctaatgttttttttttttaagcaaagactaggtttcaccatgttggccaggctggtctcgaactcctgacctcaagtgatccacccacctcagcctcccaaagtgctgggattacaggcatgaggcaccgcacccagccaatgtgtgtagaatttcaacggacatgtctaacatggaacatattatggaaaaatgttaatccaaacacaacattgtaagagggtgctgaggctagacctcagctgcactgaatggctggcagctctgaagctggaatatgtctctgggtcactttcttctgggtcatcttaactgacaagtgcatggaaaatgcttaagtgtctactcccattgatctcagagcagaagaatgacacaagcttcaagcaggtttgtcaaggattgcaattattatgggcaggtgcttctctgcaaatattatattcatgaatgttatgggattcttccaggagagcctagctacagggagttgcagggatgtggaaactcaaagaaagaagacatgatatagagaactctggaggagacaagcagaccccagcaaaatggccatgggttagggttatgaagaaaaaataaccgacaacaagcctaagcaatgggagaggtcaaggaattttaagatcagaaaattttaattataagagcagatatcaagttttaaactttactctcctttgtggtaatttctggaagtgagtatctcttcttagttaagtttgtgaaagatgacagctttcagatacccatggctgataatcttggaaagaaaaccaactgatagacaaagaacctggttccccccaaccatcatacttgtaacactaacttgcctgtgtcattgaggtgatgtaatgaggggaaatctaagggtactctgaatcacccccaaaaccacaggcggattttctctaggaacttctcttgcattgttagctagattcctctgtaaggattaagtaagtataaacacctacatggcactaaagcataaataatctgtcaacaatttaggcaaacaatgagataaagtgcatggcactttgggcacaactactgatgattaaaagagaatgtacctgaataaaatttacaccaataccagctaatgcaacaggttgcaaaaatttgttaaatttctcatcccagcctcaaagaaataactaaaaataaaaggaaattcaaaagaaaaaatggtattaaaattcagagaacaaaatgatttcttatcacttgtagatgacctttctaaaattttttatttttatttttgtagagaaaggatcttgctgtgttgcccaacctggtctcaaccccctggcctcaagtgatccttctgcctcagcttcctgagtcagtagggttaggagcataagccactgcacctgtctcatgtaacctctcttagtgcagagattttctttgttggttgctatatataccagcacccatattaatacctgcccagagtaggtgatcaataattattagttgaatgaatgaaggtgaaataattactgagcatctgctacatattaggagctgcataaatcacagtgcctattgaaaggttgctattatccctgttttgcagatgaggaaacgtgacttacagaagtaactttcctaaattcaaaaaactggtaggtggcagagacaaatccagaatccaggtatgacctaaatgctcatgctctttccacctcattcctgtcagacccaatatattttctataataaatattttaatgtgtcctttactgtcgtgaaatcaattcagagaacatatctttgcatacgtaagttcagaaaaatcaatgcagtgtcctcactgtaaaacgaaatataaaaggaatgtaacttaagacaatgaatacgcaggtatgatcacagcagaagacaatgaaacagatccttgccctcatccatagaattatcctgactgtagatctgcaaatgcagaatgatagaagtgataggtattggatattcaaatacctgagtgcactgccattgacttggtaacattccaaacaaaacaatatgcaattttctccacgtatgcggtagttgaacttctggaaaagtcactgtatattaaaattatgtaaaaatactggacacagaatactactttaaaaaaaaaaatacagatgaggtctcaccatgttggccaagctggtcttgaactcctgggctcaagcgctccttccaccttggcttccgaaagtgctgggattacaggcacgagccactacgtgcctggccacagaatacttcttcgttgaacagaactagctcctacccactgaacaccagaagtgcctgctagtctagtgaacaaaaaaacttcacacatttttaaaattccacagaggacacagtgccaccttatgcctcactggtcttcaagaacagtaagaggccaaaggaagagactaacttttttatttgtacaaacttacaaggtacatgagaaactgtgtaatatgtctataatgcgtaatgaccaagccgtggtatttagggtgtccaacacccaagtacactacatttttgttaagcatagtcatcccactctgctactgaacggtgaatgttttccttctatcttactgtatgtttgtaccctttaacaagcttctcttcatcctccacctcctccccacccacctttctcagtctctctctccactctctacctaattctctctatcaaattctttagctgccacatataattgagaacaggcaatatttgtctttctgcacctggctgatttcacttaagataatgacttccaactccatctatgtcgctgcaaatgacatgatttcattcttgttttatggctgaatattactccattgtgtatgtatgtgtatatatgtgtgtatttatgtgtatatatatatacacacacatatacatacatatatacatacacacatacacatacatacatatatacatacacacatacacatacatacatatatacatacacacatacacatacacacacacacacacacacatatatatatcacattttatcagttcatccattcatgaacacttaggttgattccatatcttgtctattgtgaatagtactgcaataaacatgtgaggttgggtatcctttgatacactgatttcttttcttttgcgtagatagccaataatgggattgctggatgggatggtgattctacttttagttttttgagaaatcttcagactgtttttcctttgtggctggactcactgtatatacgagttcccttttctctgcaaaaagtaaactttaattaaaactgctcatctagggttgagagatcagcaaagactccatagtgaaggcaaaacataagctgaagcttataaactcgggatgacgtctccaggccagaaaccttagagcactttcagacggacctcctcacacacccaatcctgctgacggagaactagaatacagtagaaactttcagttacatttcccccacactgtcctcttggtgtgggggaaatgtaattaatgatgtgaatcaactttaacgacctcagcaggaactagggaagccaggtacttaccccagagctctataaggattttagcaagtgtatcccacaaaactgggtcgtttgtggtggcggtggtggttgttttaagcctccttatgagcctattctgtgatagggttccttggtaacattttgagcactgggtgtattaggctacagattcagaagaaaaatgatgctaacagtgtggtctgtggtttttctctgggagctagactgtgtgcctctgatatttctggatcacagttttgattgtctgataccttgggcgatcttaatcatgatgctatgcttcataaatgtctctgtttgatttgaagtctcatctactctactgaatcaacattgccctgcatttgtgcctgcatgtgttggtgatgctgttcaagcatctgtccaaattagtgcacttagcttcatttccttccttgggggaatcctgtaatttttcttactatagagtttattaagaggccttaattgtttatattccctgttgcgaatgagtcccttggagctgttaacaaatgactcataataagtttgactagatgatctctaaacttccctcccagttccaacattctatgattttataagtggaacattaatttctctcatttgtagagaacttaaatgtcacaggcagatattgagaacataaagtggatcttggtgaaccatcacatacttgtacgtgctgaatacaagacacagtgggaagggtgtttagggacaaagaaattgctccagggcttctggtgattagacttgggtgggatttgaaaagacgctacaaaaagtagatttgtctttttaagtgtttggtccagggaagaacatcatctattggaaaagaggcttaaaaaagttctgtgagatgaggctgagggcagtggctaatgcctgtaatcccagtgttttgagaggctgaggtgggcagatcacttgagctcaggagtttgagaccagcctgggcaacatggtgaaaccctatttctaaaacaatataaaaattaggctgggagcggtggctcacgcctgtaatcccagcactttgggaggccgaggtaggcagatcacgaggtcaagagatcgagactatctggccaacatggtgaaaccccatctctactaaaaataacaaaattagccgggcgtggtggtgcatgtctgtagtcccaactacttgggaggctgaggcaggagaatcacttgaacccaggaggcagaggttgcagtgagccgagatcacgccaccgcactccaaagcaagactccatgacaaaaaaaaaaattatatatatatatatatatatatatatatatatatatatatatatatatatatatatgtatatatatatacatatatgccaggtatgctggtgcacgcctgtagttccagctactcaagaggctgaagcgggaggaggatcgcttgagtctgggaggcggaggttgcagtgagctgagatcatgccactgcactccagcctaggtgacagagcaaaacctcatttcaaaaaaaaaaaaggcgggatgatacagaaaaggaaaagaatgtataagtagtagacactgacaattacattctacaattaagatttctggggagtctaggtaattttaacctttggagaaaaaaaaaagaacctgagattctttccaaggccctcacagtaagctggctgccagtaagtccatcatagaccctaataccgccatcttgggtctgaagaagatgatctatgaaagagggtgcatgtttgaagcaatgcaccgtagtttcacaatattgccattttctatttttgtgaaacatgtattctgacttgttactttaagttttgttatggaaatataaaactctgtgtacctttttgtcttataaaaatatatatcaccattttcacaggtctaccctcatttctctcttttttttttttttttagcaaattctcccagattgtgatacctcatttctgaggacttcatctttaccaaatctttcaatccaaagcaaacgaatactgaaaattcatgtatccaaagcaaatgaatactgaacattcacgttgagatgatctttaaatgtaattaaatagagataatgtaactaaaattagagtcctcttctctagctcatctttactaatctgtactggatttctctatcttcttcatttctggcttcatttccagtttcttctttcctatattcatcttcagtcctgtctatttctatttcatttctctaaatgaacattggtccattctgtttcatgctttttcattcacctcagaaaatctccttttccattcccggatgacttccatacacgttcagttcgaggaggtttgtattgttgcctgtctcactgcacttccatttcaggactggccacgtctcttctgtgttcttttgtgccacacaactttactcagggagttgttttttattacttcgatttattctattgttttcttttcagtaacccttctctcttatccttttccctcacagatacacagacacacacatcacaaccactgccactaccatgctcctcactgccagtcccttcgtctctcaattccattcattatcctaaaatagaatatgtaaatccctcattcttactccaattaacttctatctctcctcctgcctcctaattcaaccccataactcttatacatccatctattctcctccttttcttctgtcaggagatcatttcagtaatgtttatgagaacagattacttatttaccacttcagtgaaaacaaaaccccccaaaccacaattcaaatattaagacaaaaaactgactagaatgttcttattcatttagcaaacatgtgctgcatagtgtactgaactagctccactttttgaaagagaattatcagacatgacaatgaccctcaaggaattttctccttctttaaaaatcataaaatcacagactaaatgtgatcgctctacaatgtctgaaatggaggagctgacaagaggtctgagatttctatttaatatgtcctttgaaggtcaaaatatttctaacagagcaggcctcctatagcaaatgggagttttcattaaagatgcaaatatatatcccaaaatgaagtcactgaagatagaaaagaaatgaagcgaggacagagagctggctcatgcctgtaagcccagcactttgggaagccaaggcaagaggatcactttagcccaggagttcaagaccagtctgggcaatatagagagatgttacctctattttttaaaaaggagaggagaggaggagaggagaggaggggaggggaggagaagagaggggaggggagagatgggaagggaaagtgaagcaaggaaagagaatgaaaggaaggggaagaggggaaggaggaaaggggagagaagggaagggaagggaatgtgagggaaggaaagggaagggaagggaacgtgagggaaggaaagggaagggaaggaaaggagaggaaggaaagaaagggaagggaacatgagggaaggaaagggaagggaaggaaaggagaggaaggaaaggaaaaggaaagaaagagaagggaagagaaggagaggaagggaaaggggaagaataggaaggaatggaagggaaaggaaagggaagggaaggagaagaagggaaggaatataggtaggatgctatgcatagataatgtagcttttaggaaaagaaacaaacaaaaaaaaaactacaactacacctgagtattttaggatacacccagaatatcctgataatgagtactgggactttggacaaaatagaaggctcagtaattatagatgaagaggctttcagtaaccctatttgctggagccagagaagctagtttctatctcttcaatgctactccgcccaagcctcagaggctcttccaaaaagaaagtatatccaccatgattagcttctagggagccactgtgaccgtgggctctcagaactgaaaataactcagcattacacctttccttcttcctacgtgacaacccatgcacaaactgaagttttattcgtgaactagtttctggagaagcagctgacataattactcacagattattcacaggataaaacttctcggtgcttcaaaaggattcttgatacactcattcgactgaacacagttacacttcatacctggcatggaaatctggcaaacagaaaattggctgtaaaaaggatatttccagtgaaacacagagcaaaccctgcagagactaactttccttccccagaattcccatggctctggatctcacccacttaatttttgttgctgtgactgaaaatttacttcaccaaactatcaactgtaatagtaagattcttgcagtataaagggatcagcgagcagaagtattcatctgtttacattcttccattgcaattgacaaaataagaaaaaaaggactctataaaagaatctgcaatatcaaaaaattagaacattgcactaaatgaaaagaaaaaaacacactgtgttagttcattctcacactgctataaagacataccgaggactggacagtttataaaggaaagaggtttaattgactcacagttccacatggctggggaagcctcagaaaacttacaatcatgacagaaggtgaaggggaaggaaggcacctttttcgcaaggtgtcaaggaggagaatgaatacaggaggaactaccaaacacttataaaaccatcagatctcatgagaactcactatcgcgagaacagcatgggggaaatggcccccatgatccaattacctcctcttggtctctcccttgacctgtggggattatggggatcgtaattcaagatcagatttgggtgggggcgcaaagcctgcccatattgcaaacatttaaaatagatttctgtgactgggtgcagcggctcacgcctgcaatcccagcactttgggaggctgaggcaggaggatttcttcaggcaagcagtttgagaccaacctggacaacatagcaagaccccacctctgcaagaaaagaaaagatttatgatagaaaatagaaggaaacagcattcgggatgtccttctgaacataaagcaaagccctgactataaaataagacataaaaatattgcaatgataagacaactcagtgatgaggagaagggttgacatggtcatgaaacaggtagaaatttttaaaaagcagaatgagacaaggctgtgatgtgaacgacaagcttgagtcagtaggctgaaatacagcaaaaagaacactgaactttttaggcttgagtcaatatcatgcttctaattatgatagccttagaacaagctttaatatctgattcagttattcacttttagtcttcttttttcaaatgtttaaacataattccacactttcttcctttcaataaaatttttccagatctaacaaataaaataccactgtaaatgtatgcaaacaaaatatatattaagttgatgagaatgtctatttttacttacatggagtcaatgaattatgtgttctcatttatttaaggctgtttccttgtccaccgactaaggtactgcacatcttaattaagtttttattaaatatattcccatatactgtcactgtttacctcttatttgggaccctaaagctacactctcttaaaggtgaaacactagggttatttttgttaaagtgaaaatggccccatcacctttatggttaacattgctttataaacattctgcaataaactaagactcttaaaaagcaatgtaagtacaaatatttaaagtaaggaaatgactttttagtgatgagcagatgcttggaattctaccttcaagaaaatcaactcaacttatgataactaaggtaagagttttgtaagatggtaagttacaataggattaaataaaattatgactgtaaagtacctggaccaaattgcaatgcttcactgtttgttagtttttagtgttatggccttagctattcaagcatatactagtgcacatttgggagaacatttctatgtggaaatgtggaggaggaactgatgggccatgggccatgcacattttcaactccaccagatcctgccaaatggctcaccaatttacacccccatgaatactacggtgtatacacactcgtgtgtcacttaacaatgaggacatgttctgagaaatgtgtcgtttgattatttcgtcattgtgtaaacatcatagggtgtatttaaacaaatctagatggtatggcctactgcagaccttaggctatatggtatcatctattcctttggctcctaaggctacaaacctgtacccatgtgactgtaatgaacactgtaggcaactgtaacacagtggtatttgtgtatctaaacatatctaaggtacagtgcaaggtacagtaaaaatatagaatacaagaaaaaaatataagacacttagcatgaatagaccttgcaggactggaagttgctctgggtgagtgagcgagtgacgagtgaaagggaagccctaggacgtcactatacactactgtagactttatagacaccgtacacttatgctacactctattttaaaaacagttctttcctcaataataaattcggctcagcttactgtaacttttttaccttataaacttttaaatttttttaactttttgactcacaataacagcgtaaaacacaaacactgtactgctatacaaaaatactttgtctttatattcttattttataagcttttttctattttacctttttgtttgttttacttttacctttaaacttttttgttaaaaactaagacacaaacacacctattagcctagtcctacacagggttgggatcatcaatgtcactgttttccacctctgcatctcatctcactgggaggtcttcaggggcagtaacacacatggagctgtcatctcctatgataacaatgccttcttctagaatatctcctggaggacccgcctgaggctatttcacagttggcttttttatacatataagtagaaggagtacactctaaaataacaataaaaagtaaggtaaataagtaaaccagtaacatagtcatttatcatcaagcattaggtactgtacgtaattgtacgtgctagatttttatactattagcagtagaagtctgtttacaccagcgccattgcaaacacatgagtaatgcattgtgctacaacgtcactaggtgacaggaatttttcagctccattataattataatcttttttttttttttttttaacagagtttcactctttttgcccaggctggagtgcaatggcatgatcttggctcactgcaacttccacctcctgggttcaagtgattctcctgcctcagcctcctgagtagctgagattacaggtgcacaccacaacatccagctaattttttgtatttttagtagagacagggtttcaccatgttggccgggctggtctcgaactccttacctcagttacccacctgcctcggcctctcaaagtgctgagattagaggcttgagccactgcacccggcctccattataatcttgttggaccactgttgtatatgttgtatatgtggtctgtcattgatcaaaacattaagtgccacatgactgtattttaaataaatcactttacacactaattttcaagatcatatcactccaaaaagcaagacaaacctttttcttgacagcagttaaaaatctatagaattctctaaacaaaatttttcaacagagaaaattatattaactgatttttttctgccagagatgaaaattttccggtgtctaggataactcaattggacaagaataactgaaaaataccaacattcgtacattttcttgttaagtttatcacaacttactaaatgctatattatatgcttagttctataaatgtatacatgtatatacactaaatactgctatatatatataaagccatatatatctagtaacatatcatcttttctcatgttgatgtactttgataattgatgagctcaataaaaactgaagataaaagcttagaatcaccataacaattgtg

SEQ ID NO: 6787 - DNA, 493999 bp, Homo sapiens
  misc_feature (1)...(493999): n = A,T,C or G, or insertion/deletion polymorphism (see Tables 1-2)
ggagtaacgtatggccacccctggcctttgatgctttggggaggctatggacctgagcactgatggcaggtgggctatctccttagatcaaaaagacccacagcagagctggcaaagctaatattgtgtttctctttcttactgattaagtctcagcctctgtatctttttgcagagggcaagagcattttgaagacgaacaaatgctacagcttttgcttttcctctttcagactgcatgaggaagagtactttgggatctggttaaattcagtgcatttttattgagtgcctgcaaggtatggttttagctactgtgggaaatccaatgattaataaatatttacctccctcaaggagtttgtgtctgatgggagagacagacttacagatgagcaactctacaaggttgtggggtggcacagagtgtacagggagttcagaaggaagccattcatttaggtctgcgtgtaacttcttcttggtagggggagaaataattctgttagggcctggaaaaggctgtggaattaaaggcaggccttgtagacaagtggggcagtcggaggcggagggaggaaggattttcagctgcagaggagcgtgtggcaggcctggcagggcaggtggagccgaggagggtgagggggctgagatgagatggaaagatgggttgtgtgctggagaaatgagccatcattcagaatgctcggcgaaatggtcccagactttggagtgagagttcaggaaggtaactggtgatggagagaagggaagacagtctgtacatctcaccgaggggtgatgaagtcttgggccaggcagtgtggagtggtgagatatcctgggagggaagtcccaggatcccagggctgccatcagctcactgtgtaccttgagccagtcacaacgcccctgtagacctctgttttcatctgtgaagtgggctgatgggcttactatgttttttctcaagtgagagtagtcaagttgttttttttgcttttccctgaatgggtgttacatttcattaaatgttttctctgcatcagttgagatgatataataattgtatgtatttatggggtacaccttcatgtggtacatatgaagtatggtgatcagattagggtaattagcatgtctctcatctcaaatgtttatcatttcagtatcttccttccagccatttaaaactgtatggtatattatggttaactatagtcatcctaaggagctatagatcactagaacttaattctcctatctagctgtaatttcgtatcctttagcaaatttctcctgtccccacttcccccctacccttcttaggctctagtatcctctgttctcctttttacttctataagctcagtttttttagcttccacctatgagtgagaacgtgtggtgtttaactttctgttcctatcatatttcacttaatgtcctccaattccatccatgttgttgggaatgacaagattctattttttttaaatggctgaattgtattccattatgtatatataccacatttttttgtatcccttcatttgttgttggacgcctatgttgattttctttattcatctgtgtgggacacctaggttgactgcgtatcttgggtattatgaatagtgctgcaagaaccttggggttgcagatgtgtctctgatacactgatttcctttcctttggataaatgcccagtggcgggattgctgggtcatgtggtggttttatttgtagtttttttaaggaaccttcatattgttgtctataatggcatattcccacggagtgtctaacagttctcttatctctgcacctcactggcatttgttatttttttgtcttcttgatactaactatcctaactggggtgagataatacctcattgtggtttggtttgcattttcctgggcagcttttttatagacaatcaggagactgaacagaggtgatcgcagtacctttttaggtctctgataaggcacagctgcatgaggcatgagtgcagcctgttaattttttattttagggaaaagatccactcactgtaggctgtttcacactctcctagaaaaagaaaaaaacaaaaaaccaaaacatcatccaagcaaagaacttggcgcttggtttatctctgtctcttttcccacttaacatctcacacaatgtgtctagcttctacgctggagtctgctgtccagggttgagaaattcatgtggacctgaagatgctcattggcagccaggccattataaaatgaagatggactcgaccagggagaatgtagtaggcattcagcccaccacccagagggaggctggtgctacccttgccaggatgtgaatgggacgccatgagcttgttctctatggagttgttcccagaccctaacagatcagaaaattgaagcaaaactgagcgatcagcaaaaaggccrccatctttgtagtacgtcatatgtcaggtgacaacatcttagatgccatttgtcatcctcatccttcttaaaggagacaagaagtcgttgccctcaacccctaagaaggggcaactgtgaaaggccaaataatcagaataaaggatagcctctcacattacatacttttggattcatttaaaaaaattccctacatggttcttgtttttctcatgtcactcaagaattgggaaccacagccctggacttgtctgggtttaggtgcctgcagtggagaccccagttccagagtcaatcagtgaaccacaaagtaccactttcaaattgcttttcacacacctccttgtactaatttcctattgctgctgtgacgaattgccacaaactcaggggctaagatacgagattcagcgtcctaaagtgtaggtgtcagtgtcccatgctcccacggggctgtgggggagtgctgcgcttcctcaccgcttccagcttccagaggccactgtgttcctcggcttgttttgcctctttcttgcatctctttgacctcctctgcttctgactctgaccctcccgtcttcctcttataaggacctttgtgattacattgggcccacctggattgatccaggattaacgctcatctcaagatcctaattttttctttttgtttttgagacggagtctcgctctgttgcccaggctggagtgcagtggtgcgatcacggctcattgcaacctctgcctcctgggttcaagcgattctcttgcctcagcctcccgagtagctgggattacaggtgcgcaccaccacgcccggctatttttcttgtaattttagtagagacggggttttgccttgatagctaggctggtctcgaactcctggcctcaagtgatctgcctgcctcagcctcccaaaagtaatccccccaaagtgttgagattacaggcatgagctgccacacccggccaagatgctgaatttcatcaccctcgcagtgcccctgtggccgtgaaagcttttggagtcgtctttggagggctgttactctatctgcatccttccgctcctctctcctactcccttgtcaaatacccttgcaaggctggcttttaatttgtcttcatatatgggattatttaatcattagtcctaaaatgaacaaagggctaggggctgggcatctggggttgtgatcttgactgggttgcatgatttggggccatgtgcataacccctgaggctcttttttttcttacctacaaaatcatgggttgtctggctcatttcacagttaaatgtgaagtttccatatccatgtatgagatttcaatcactgctttccactgtctgctttagggattggggagtagggtatttagaggtgaaacaggaagaaaggaattatgtgtatgtgctttacaaattcacatgtgcttgaatgtatttacccttgatgtgctcattttatttcatttctatgatttttgaygtgtttatttttcccacgtctagaacagaataggtgtgctggcagggatgctgttaggaactgtgatagatgtatttatggttcctgaaggtttacgaatacggtcatgctgagctggggaagtccagcctctgccctgggcttccttcacctgatgcagttatttcttgttaaagattcactgtaaaatgccaaataaacttaataactaactaataaccatctttgtcagtygaggacacttacattttatgaattttggggaaaatataggaagatacctgaggaaatagaattttcaatatcataggtctagcttttgatattacagaatttttgtgcacatgtggcaatgtgcttgctttggctttctaaaaagaattcaggtagcggtagacatcttgatagcagtaaaaaaaatacaaccaaaaggaaggccttcaccgttacctgagtgttcaccatggaccccattgtgccagatccaacaggggcatcattttctctaagacacaaaacacacacgcaattctacgaggtcagtatccggtccttattttggccattgaaaacctgaagatagagcagatcgtttgccagagggcaggcacccaggggctcggggaggggtgctgccctacccactttagctgtctgtagagaccatgaacgtgaacaccaggaggctgcgtgcgcctgaaattctggactttacagcctgaggtgcagcctcaggcagctcaggtttatggaggccattccttgtacggctaaagcaccttccctgtccttggaggtgtgggcaggaaatgttgaaaggtgggtggctctgccctctggtggcttttctttagttggggatgtcttaacacacacatctgaaataagactggctcatgcagaacaagagatgggaagctttgcgtggtgccagggctgtttggaggagcggagttaaaagatcaaacacagacttgggtctggctttcgtgatgaggtgcacccagtgggaaggcccagctggcgagggagaagttggtacccaaagatgtgggctggactggcttctttccttcagtagaagcaagggcccagggaagggagtgtgtggtgggaaggtacggtggcccgtgcttgccagaggagtttgcacatgacatggtttaattttagagaattttagaggtgtgccacaatgcaggtgccttttgtgcatagcctcgcctggctgggctgtgcaggatggatggatgagagctttgatccgcgattttgaagatgagttttatattgaatgctatatcctattaggtagaggctgttgggtaggaggaacattaatatatatttttttaaattgagagtgggctagttgaatactttttgggccttaaacactttgtagcatcctttttacacctgtgactgctgcctttattccataatgcatgagcaaaagtgtggttggaatttaatggtgtgactttttaggggcttatgtaggagcactatgatccttttgcaaaataggagcagctttatgtcaggataaacatgggatttcagacatttcttgcttatcattgtcagttttaaggatttcttctaacacaggacatatttttgtctactgtgattgtaaaatctattggcttaatatcaacattgctatatgataatttttttattaatttggtttccaaagaatattcactccatgtgcaattgattcataggcagataaaaatctattagtggaaataaaagatagtattgaagtgtcaatcaaaatactgttaacaatgtcttcttatgtcacttatggtcatctggtgtcatgggtagttatgaatttctcctccttaaactattgaccctttatatttgtctgaaagaaaaggtcacttctgtgggtatcagagaggatgatgcaggcagcgactgaatgtatttcaatattaaaaacaacaacattaaaacaagccaacacgactcagcatggtcacttctatctttactattactaatatatttccccttttttcatcacagctttttataactatgatgccagaggagcggatgaactttctttacagatcggagacactgtgcacatcttagaaacatatgaaggtgcgtatgcatcttggtatcttttctcttacattttgggcagatggcacaccttctcagtgcctgctgggcaaagcattcctctgttacagacacataagacagtcatgcttccttctcaggctcccttttcttgcagatggatactgtttcaggtaagggtagtagtgaggctgttgtttaatactttctgaaggtgaacttaaaactgaaattcccatttttaaactccttggctccttattttcaagcatgtgtaaatcttttttttttttttccttttgagacagagtcttgctctgtcgcacaggctggagtgaggtggtgtaatctcagctcactgcaacctctgcctcccaggtacaagtgactctcatgctttagcctcccgagtagctgggattacaggtgcccgccaccatgcctggcaaatttttttgtatttttagtagagactgcatttcaccctgttggtcaggctggtctcgaactcctgacctcaaatgatctgcccacctcagcctcccaaagtactgggattacaggtgtggtccactctgcctggccaagtgtgtataaatcttgattgttaacagttgaccacttgataaaaaataggtttaagatagtttacttcgttgttttgagacagggtcttgctccatcgtgcaggttggagtgcagtggcacaatcagagctcaccgcaggcagcctccccatcttgggctcaagcagtcttgccacctcaggctcccaagtagctgggactacaggtgcatgctgccacactcagctaattatttatattttttgtagagacaggatttcaccatgttgcccaggctggtcctgaactcctgagctcaagtgatttgcctgcctcagcctctcagaatgctggaattacaggcgtgagccactgtgcctagcctgcttcattgttttgatgtgtttgatgtgaactaagatttcttcttttaatgtcctcacttagatttgttagcagtatatgtctcagaggaaccccaattttcatcctttcctttttttttaaacctgtaatccccattttcttgggatgaacagagatttatcatagttatatgggatgccgtccaatgaagcaatatttttttttgttttttttgagacggagttttgctcttgttgcccaggctggagtgcaatggcgcgattttggcccaccacagcctctgcctcccaggttcaagcgattctcctgcctcagcctcctgagtagctgggattacaggcatgtgtcactgtacccacctaattttgtatttttagtagtgacggggtttctccttgttggtcaggctggtcttgaactcccaacctcaggtgatttgcccgcctcggcctcccaaagtgctaggattacaggcatgagccaccgtgcccgtcctgaagcaattgttataattatccaataaataaactattggtgacagtggttttccaatgtccttggcttttcagacaatttgtttttatattttgtgtttgcaaataatttgagcatgccatatttcattttatgctgtggttattgttgcacagaagggaagaaatgatgggcttgattttttaaagactgttcagatctggaggttttggtgagattgtgttttcttattgttgtcggcttaatttcctgcttgaaagggtggttcccatatagcatatgaataaaaaggataatttcagtagaaaaactgctttttcacagaggttttttagcaaaacccttccacatgggaggttgggggtgagaggggaaattgaagacatcccgtagtaatcagcaaattgaacttccaacttgaaatccactttacaaggaatgaagtatgcccagcttcctgctcgaggcaaactgtgaccagctcctggtagactcctctgagaaacacagacctactaacagatccatgttcatggcccttatttccccatctgatgcatgctgtaccttccctaaaaaagtcctgtctgaaaaaaaaaatcgactttagtggcctctgcgtggaagccagtgcagctctgcaaaaaccagccccagtccttaagcggatgagtagttgtgatggggtcttctgcttgttttccgtgtttacagctgacagctgtgttcccttatctcctctcagtatatactgcatgtgtctgagaggagacagagagaaattaagtagaggttaaggatcaaaccgctcatctcagacacttttctgatttgaagggaaatgctcttgtatcttgttttacttttgctgccggtcagttgaagttgaaatcctggttaataaacactgggcaatgatgtcattcctgaatagttaatgatttcctgtggcccctgggcctgtggagactgcatttttgttctttgcttcataagaggaatgcgtgtgtggtggtggttttttttttttgagatggaggctcgctctgtcgcccgggctggagtatggtggtgcaatttcagctcactgcaacctctgcctcctgggttcaagggattctcctgcctcagcatcctgagtacctgggattgcaggtgcccaccaccatgcccagctgaggaatgtgttttttaaacagtggactcctcgggcatgtcagtggtccttgtaatacgtgtaacttcaaaaatatctgattgcaggcatttgactttttggctgacatcatgataagagatctacagtgaacattaattttctgggctagtcattctttctagattctgatgaaaatatttcagtctttgtaaagactctttagcataaaatgaatttcygttccttgacaactaactttttggttttaatctgaatctaatcagagaaatgcatttggagaagtattaatagttttgactttggggagtgtggtgactttttgtcattaaataaaaagagaataatgtacttccatttgttttccaatatcttcctcttgttttatctaaatttcatggcttgtattagagtctggcattttctttttctttccttggctctccttttcctctaagatgactttttggtttagcaagtttgattttctttttttctatgatcctttccaggatattacagagcttgctccagaggctataatttctagatgataaatctttattttagggttcaaagactaaatttaccttcaagttgtggttaatttctctttcttgagctcacgaaggcttacagcatagaacaaagaaaatgagctttctagctcatggtggaagtggaaagagctttgagagctcattcgtgcagacccctgcctttaaacaatgtcctacctccagataggagaggtgaggccaggccccagtgttgattgagtgactcttgtctggtcaagggcgtgccaatcctgctgtcgactcgtttccatagggtccccagggcttccatagcgtccccagggtgagatgctgcaccagaggcaagctgcaggcattgcccaaagttgaggaaattgtccttttgattcagccacattcaaacttaatttattcaactctttaaaagggatagtgatgcattttcttctaaaatgactagaccgccattttcctgtgctggactgtgtcctccccgagtttgggacctgtgtcttgcctgtatttgcctgttccctgggtggatgtctctttttttggagcaggttggttgactacgtggaggccacttgcaagccgtgccagggagaagttaattctgtaacagctgtgaatctttctccttccagcctcatcccctctttgctgtgccccagagcagccaggtaatcgttccgttctgttctcttactctccggtgcaaaacctctgccgggacatcctctctccttcatgccgaactctgtcatgcagcagggtttgtggtgtgacccctacttgtcttagggcacttccagtttctgagctcatggaggacagagattgggtctaatctctttctgtatttgtggcacccagtgtggtctctggtacatggtgtgcgggctcactttgttgaagaaatagtgcatgccaaaaatcgtggggaggaaaaccatggttttcattttgcttaggaaggccattagaagaggaatcgactgcctatgaacattaaataaagacacaaaactccttgcctttcatgcctactgcttggcccttcctcctcctgcctcccatagaaaacctttctactgtgtgtgaagtggcctctcgtttgcctgtgttctcgtgctgtttggtgtgcatctgtttttaacagatgtaagtgtgtcattatagtcttgttctgttttttattttccctcgtgctccatttaaaatgcactgtgttctctgtgtccctttagtccatggctctaactgcatcgtgtgcacatttcatgttttactaactgcctgcctccccgggtatgagcacttaggttgtccccgcttcccaccacccaagatcaagctgccctgagcatcccatgtccatctcactctgcagggcacacagatgtctttgggctgcgttcccaggagggggttgctgggtcttgggtgtggagatgtagactttggataagcagggcctgcttctcccaggctggttgccgcagtggacactgccacccacggtgaccaggggcttcctgcatcctgcagtgttctgccttctaccactcttaactgtgtacttttcatttctctgactattattaaactgaagcatctcttcatacatgttgaggtcttatgggtttcttctatacatagtttataaactttgctcattttctttcttttcttttttttttttttgagatggagtcttgctctattgcccaggctggagtgcagtggcatgatctcagctcactgcaacctctgcctccctggttcaggtgattctcagcttcccgagtacctggtattacaggtgcacgccaccacgcccagccaatttttttttttttagtagagacggggttttgccatgttggccaggctagtcttggaactccagacctcaagttatctgccctcttcggctgcccaaaataccaggatgacaggagtaagccaccactcttggcctcattttcttactatacttagttgctgtctttttgtgtctctgtattatttccttatgtattctaagacgttaatctttgtcagtttcagaaaagaaaggacatattaatgttgaaaatgcaggaagactataataggataaaggacagttgttgaaactgagtacacagctttgcataactcattcaactgacctttctttttcctttttgatatatgagcactgtgtcatagatgggctttgatatatgagcactgtgtcatagatgggcgctgatactgggccagcttatcaaaaccactgaacttgacaatatggctatcaggagataatccttcaaatgtgtggctgaagtctaggcattttgtatctgaggttcccccaatcagtctgttgagtctccagtcaagagagtgaaatgagttcagttcatcataactgggtcttagcaaaacctttgccagagtcctggcagtttctgtcctcttttctggatatgcagaaaacagctggttagtcatcccttggggattctgctcatcttaacaccatcactttctggttcacaatcatccttttcatccctggttgtgaaaattttcaccttttgagagaggtggaggccagttgctgtgacaatggcccgttttcacatctgtctgatctttggttctgaggtttgccttttyaatagtgtaaagaaacccagtatttggttattctctgggaatttacccagctcacgttttccaagtgccctctgtcactctctgacagggtcctttgttcctatggggcagagttgggatttgtctttaagctttttttttttgagatagagtcttgctctctcatccaggctggagtgcagtggcatgatcttagctcactgcaacctctgcctctcgggtttaagcaattctcctgcctcagcctcctgagtagctgtgatcataggggcttaccaccatgcttggctaatttttgtattttttattagagatgggctttcaccatgttggccaggctggtcttgaactcctgacctcaagtgatccacctgccttggcctcccaaaatgccaggattataggcgtgagccactgtgcctggcctctttgagcttttgattagctttccagaaactagatggcctggagtgacttcagaatgtttgggagtaaaaaatcatccatctgaactcacaaatggtggggtgcttggaggctggatactgacggtagacccctaggcctttgcaggggcagttcctgtcctcagcctgagaggggtgccaggggtgtggctgggtctggtcccttgttgaagggactcttctgtgtggcatccatggcatgcggatggttcgagtgtgtctttctttctgctctcactattttctttctctcgccacttggaaggagcgagaagtggagcctgggccaaacccaaagggcaggtgtgtcctgtgcttggccctggagcttcctgtgggttgagggctgtattgttgctacagaagtactttgtgaggtcgtggctgctccaggaaaaagtgccctgtcttgaagtgggaggaagttctctctcaatgggttttctgttttggggcagcgagatgctgacatgtgcccttggagagatcttggtctaaatcaggcagagggagagtgaagaaaatgcatacacaaggagcctactcagggccagtggttgaaaggacaagtcctgctcttggaactgtgcatctgaacttcaaactgctgcttccgaaccacatgagatgacggaggtgaaggtatggaggcccatgtgtgaaggttgccagctgggctccgggtgcgctgttgaaatgctctctgggaaaccacgtagtatatctccaaagccttaggttcactgaaaaatgctggtgacaaactgacctcactggttctgccaaacagtgagttctacacatcatgaatgtattgtgaggmccctaacatgtctctttgtactaactgtttcaactttgtgtttgtttagggtggtaccgaggttacacgttacgaaaaaagtctaagaaggtaagtccttcttcttaaacacagtgcawgtctcttcataaatcacaccttgagaggaaatcaattccatctcatttgtgtctgagggttttacttctatatctctttctctgaatttaaaaaaatatatgggtaggaatgtgaacgagcttggattgttttcttctgaacaatatgtgtacatagaaattgtagcttcatctccrtgagtgaattgctagtttgtgatatagtgttggcctgttgtcttctgttcatgaattttgtgtcctttttaggtctgtgtgtgtcagagaatgatccgagtaaagcgacttcaggaaaaaaattatttctcacagttgtcaatcttatgttgtccttaataatagattagcaaatttgcaagctcatgcatgctgtttccctcttgcatataactgtttttactctgcctaagtcaagctgtgaaaaaaggagttctgctctcctagagcagtttgcatgagtggttgtttgaatttctgaaactaagacatgtaattacacctcggatcattgtggtgggcactcccatacacaattctgttgtggctttaacattcttagcttcatggaacctaattatggctcttctgtttcattctacgatgttaagattttgaagtaacctctattctaagctgtggttgggctgtccacgttacccratatgttttaatatctaattatgtttgacccgatgtgttttaatatctaattatgtttgacggatggttcattttacttttgtgtcctaaatttacctctcattatctccttattgggctggactctggattgtggtcctgagcctgtaataagtcctccaaagtctagtggcccaagtgccagggtccttccactctgccttccccagagcccctaacccaggctttgctgagcaggtcagaatgggtcatcctctcgcaacaccagcacttgggaagggtccagggtggtccctatggcagccatcctctggcacagtcatgtctaatgtgagagacagtgttaggaaatcagtgagccagatctgcaaattgggaccaggacctcttacctccaccttgccaacctcagactgggctacaggtctctacacatcagtgacctatagccttgaagtttgcacaagatcgatttcaatccagtggatggtggaatagatttctccaaggaaagttctattttcacattggttttcccttccccaatcaagagtgaattccagccaggcccaaagatatgcacctgtaggcccagctacttgagagactgaagtgggaggattgcttgagctcaggagattgagaccagcctctgctggtcataatgagtgagatctatccctaaaaaaatagtgtgtatctgcagatgaarctctgaatttaggaaagctgcagttgaaacctttagtaataagagattaagatcatggactaatatgcccctcccccatcacattcctacataggacacaactgccacatcctgggctggatgtgccccaggcaagctgttcctttttctttgaatcttacttggtatttgttatcaccttccccaatttgagatctcttccattcccacaatgcctcctgaaaccacagtatttctgcactacacctgggcacctagacatcataactcattcataactcatcaacacagtagcgctgggtagggcatagctatttttccatctaagatctccactggtagatgaataaatccaagctttacwgagattataaatttgtaaggggcctcctaggcagtagcagaaaagggatgtgggccctaggaatcctggcaccacgtgtctgtaaacaactttcctgtagttataagtgtgcagttgattggggtggtgctgagcaggcccagyggaagttgcgcatttcaaacctgcaggtgtgtccagcctcactcagtcattatccttcctgtggcttcatgattctccagtgggtttgctgagattgagggttgtctccrcctgtggacatggacaagactgggactggttttttgtttttctcccccatctgggtggacacctattgctatcatggaaagaaacccaggagggtgtacctgggatttggaggtgtcccggataaccaggacctgaacacagcaacccagcgttgggtcccttcagacttctgttttttttaagttaatgttttatttttttggagacagggtctcactttgtggctcagactgagtgcggtggcacgatcatagatcactgccaccgcgacttcctgggctcaaggtattctcctccctcagcctcccaagtagctgggactacaggtgcacaccaccatgcctaactaatttgtaaaaaaaatttcggcagwgaaagggtctcaccatcttgccctggctgttggtgagctcctaggctcctaggctgaagtgatcctctcaccttggcttcccgaagtgccggttgcaggtgtgcacctctgagcctggcccagccttgtttgttgctcagcctctgactctctgcctgacgccttccctctctgtgataattcttctttatatggaatttggccactttccttgttggcagaagcaacatgaatcattggtgcctgctagaccagttcagccccctgcctgccccctgcccaccccctgcccttcccaaacttgattagtagcttgttttctgcatcattcagggctgaatgccggggaaacccatgcagaagcttccattcccacaacaggtgccttgaagccacaggggtgccactttatcaatttctgctgcatgcactaaatctcatgcaggaagcggtagctgggctgcgttgcactgcccaagaccccaaccccgttgcctcttttcttacctttgctttattccagtaagggagttattttgcttgctcagaaagcaggaccctacgtttttttttttttttttcctgaggcggagtctcgctctgtcgcccaggctggagcgcagtggcgggatctctgctcactgcaacctccacttcccgggttcaagcgattctcctgcctcagcctcctgagtagctgggactacaggtgcccgccaccacacccggctaatttttgtatttttagtagagatggggtttcaccatgttggccaggctggtcttgaactcctgacctcaggtgatccacacacctgagcctcccaaagtgctgggattacatcgtgcctggcctcggacccaaactcttgataaagctctttctggcacttcacagaatgtgcctgaggctgaatgtcctgttgagaaactctccccaggcttcattctcttgggctcacatgtgcattgcacttgagggaggccgaccagcttatcagcggaagctagggtgtacccccaggtgttgtgcagattgggcgaaattcggcctgtctttctgtattttaccagagggcccccctgttggggaagtctctgagaaagtctctgtgggtctgggtacgtggtcagtgcacaagggacaattggtggtgtaaaccaactttcatcattttgaaagaggagaccatcatcaaaaattgcttttgagacatcagttggcctttgttctgcctgcattgaggccaaaaaggtgtgatctatggagcagcctgcaaattgcctgtatctttgtggactttttcctttgyaagtgtgttgcctgtttgcttctaagacatcggcagactgcaatacaagccaaatgagttgccgtcttttctacttctttgtgttttctttgatatgttaagacttaaaaaattaagagcgatctagccacccctcaccccacctttttgggaactattgtttgrtttacattcagcaatcctattgataataaaagctactgttttttttttcctcccaaagggtatatttcctgcttcatatattcatcttaaagaagcgatagttgaaggaaaagggtgagtctggtcttgatgtttaaatgaagaattgcaagtactatatttggccttgctgctcttttgtacgatggcgtaatatgagagggtcaagacaatgggtgtgattgactcctgggggacaggagttttggggagagaaaggggacttgtgattcagagttgtgtttaacatggcttttatcctttatggagtctgaagtcagcaccatacttggcagttactgtccttgaacctggggtcactattggaaagcattcgccctggtgctctgtgcttcctctgtgagctactgacttcatttggcagagactccaaagccccccagctctgagtccccttttttttgggaagacattgcaggctgtgatataaatggagtttagggtgaagcaacagttgttaaattgggacatgcaggagtttacattttgtctaattgtgatgtatgtttcctagaggtcataaaactgatgtataagatcattaaaaggacatttctagaacaggaacccattaggcaggaatggcaaatgaataaccaggtgtgaacttggaagaaggaacattaaaatgttttctttttttgtctctgctacatcttcacactcagttaaatatgtaaattataaaattactaatcatatgattactgcataatgacatctctttggctgattacaaaattgcctttccaagcactgtacttttaacatatgaaaagaaccgttcgggttccatagttccatgatgcatacttaaaatgaagaaaataatttagaggcatgaatgatgatgacctgcaatatggtactttttagacagataaagtgttttgtatgcaaagttttaaagggaagaaaaagaaagttgagacttttactctgtggaagtaactggatcaagtgtgcatttagtgtactttatatctgcattagaatccttatacagggcagactgtgtatgattatttaaaaagcactttgatgtatacaaaagaatatatgtaaaatgtaattatgaagcatgataataaagtgaacaacaggttattctgagtctcaataagtagagtcacacctaaccagacaggcagacagagacacatttggttcctgttcctgggccttctggtccaaggtgccccactgtgggcaaatgcatagagctatggtgaaatgaacagtttagaaacaatttccctgcctttgctttgggttccctgtgattgttctccacactgttttcctggctctatctgtctcccttgccacggccactcaagcctagctgcccaacagctccttccctgaagaaccccggccttcaggcttgacaggtgatctcatccctcttcttttcctccaggttgttgtagacttccaccttcccttcttctcctggtcctttcccctttctagtgccaatgtgggccacgctttcatcccacctctgcctgccttcttgctctccaagtttattgtcctgtctctcttgcagagtctgtctctttcaggatctgtctcttgctggtctcttgcatgatcgttctcatatggcctctgtcttgcaggctgccttgtaagcctctctttcttgcatgagctctctcttgcatgatctgtctcttgcaggctctgtctttctcttgcaggctctgtctttcttttacaggctctgtctttctcttgcaaggctctctctcatgtgatctctctcacagtatcttgcttgcattgactctcgtgaaggatctcttttgctttgtctctcttctctctggacgctgacttcattcattctcagacatcccaaatgattactctatgcctgttaccactgattctgtacctattcccccataaccaaagcaattcccattttgtcctccatgcttttcccagtactgacatggttagcaatgcctccttatgtctggacctcacagtgtcttctcatcctctgcctctggagctccactgcagccttggacacgttggtccttgcttcactgaaagcccctcttaacgccgatgctcttatcctcttcttattatgctgacctactgctcaggcatgtcaccrtctcctctgtcctgtgtccgctactctgagggtgctgtcctagccttctcctatttctttgttgcccctccctgattgacatggcctctgttgcgtttccctcttcagctgatctgtctctgtgggtgatgctcacatcgggaccaccagccctgatttgtctcttgacccctcattcagttaggcagccaagtaactaatgagaatcatccccactgttgggtgagcatctgctatgtcccattcattctcttttcaaaaaaaattattattatttttattttgtattgtgtatttttattttatgagatggagtcttgctctgtcacccaggttgaagtgcagtggcgagatcttggctcactgcaacctctgcctccaggttcaagtgattctcctgccttagcctccccagtggctgggactacaggcattcaccaccatgcccagctaatttttgtgtgtgtgtgtgtgtgttttttttttttcagtagagatggggtttcaccatggtggccaggctggtcttgaacttctgaccttaagtgatctgcctgccttggcctcccaaagtgctgggattacagatgtgagccaccgcacccggccaaaaaattatttttagatttgacaaataaaaattgtatrtatttatggtgtgcaacatgatgttttgaagtatgtatacattgtgggatggctaaatcaaactatgtgtgcattaccttacatacttatcatttgtttgtagtgagaacacttaaaatctactctcagcaatttcgagtatacaatacatagctattgtagtcacctkggtgtaggataggaggcctgttgaacttattccttctgtctaacagaaactcggtgtccctttgacccatcatctccccactcccctatgtcccattcttttttttttttttttttttttttgagacgaagtcttgctctgtcgcccaggctggagtgcagtagcatgatctccgctcactgcaacctctgcctcytgcgttcaagcgattytcctgtctcagcctcccgagtagctgggattacaggcgcacgccaccatgcctggctaatttttgtatttttagtagagacagggtttcaccacgttggccaagctggcyttgaacccctgacctcacgtgctctacccgctttagcctcccgaagtgttgtgattacaggcgtgagccaccgcgtggagccccattcattcttaaagatgctctgccttgatgcactttccctcagtcttaccagcagccctatgaggcaggcattattggggttacatattcttgaacactggcaggtarcaaggtggtaacaaaggtaagacaataaagccagatcaratgtgttaatgccagctggcacattaatcccagggatccactgggcctaccagaagggaggaacctaaggtggaaccagaaccaacagcaggacatggtgcatgcactgaggccctattcacatggtggaagggaggtcgttgagctccaggctyctcatagccagtgtgaggagcaccagtgcactcaacccaggatccgtaagatgaaaayagcccagtcgttgttgcagatcctcatactgtgagtggaaggaaatttctccctgcagactttatagggatgacaccgtagcatgtaatgaaccgcatttccatcagcatccttactgggaaacttggggacatccttggcagggctgttttaatagtcatgttcttcagtagacactgatggtggcccatgaaagggtcattttgttgttgttgtttttgagatggtgtctcgctttgttgcccaggctggagtgcaatggtacaatcttggctcactgcaacttccgtctcccgggttcaagtgattctcctgcttcagcctcctgagtagctgggattacaggcccgcaccaccatgcccggctgattttttgtatttatttatttttagtagagacggggtttcaccatgttggccaggctggtctcgaactcctgatccacccacctcggcctcccaaagtgctgagattacaggcgtgagccaccacacccagcccaaagggtcattcttcatagcagttttctaggggatggttttgcctgcacccttccctctgatgtctggttctggaactatccatgagaccaccgttcttccagggtccccgttgtctgttgctttgggatcctcccctccactgtcaataagtcatcacaggcctgatctccaatcgtgagccagtcagggttccttccacaggtctgggctctgtgcacatcaagggttgtaggtgggaactattgtagcatccctcggcatcccatgctggccacattcttgcctgttcaggacacacagacaacctgtggggccagctagcctaactacaccagccacaaattcactctctccccctaaccctcagtagtctgagtcttacttagcatagtgcctgacccagagcacatgcccaggaagcagtggttgatttgatgaaaacgagcgcataaataggtaatgagttaagaataagtcaaggggctgggcgcggtggctcatgcctgtaatcccagcactttgggaggctgaggtgggagtatcacctgaagtcaggcgttcaagaccagcctggccaatatggtgaaacctcatctctactaaaaatacaaaaattagccgggcatggtggtgggcacctgtagtcccagctgcttgggaggctgaagcaggagaatcgcttgaacctgggaggcagagattgcagtgagccgagattgcaccactgcactccagcctgtgtgacagagcgagacaccgtttcaaaaaagaagagtaagtcaaaggttaaacttttggggcggaggaaaaaggataagaaagaggatacagagtttaatcagagttggcatcagatagagtaaccatggacatttggaagctgtaacctctctcatatttcgccaaggataactgcttcctgtattatcatgtaatgagttttatgcgtgatggaaaatgtaaaagtaatcttaacccaaacctgcattttaatgccacatggaccggctgtaatttatggcatctttaagatagatgggtacacatattatgaatatactttccttttgccagacsttgacattctgtagacttttaatggaatattatttgcctctttcatcttacyttgacgtatgaggtggatggcttacgtgcagggtaatgtatgaaccttcccaagctctgtacaaatataacttgtcattcgtagagacgtatgtatttatatgtgtgcatgcagtcttatttgtagattttcttcccatttgcttaatactgaacgctatggcctagatgtgaaatttaccaggtactactcatagcaggcagtgaaaccgtggactcagctgctctttccttctttcctcccaggcaacatgaaacagtcatcccgggtgacctccccctcatccaggaagtcaccacgacactccgagagtggtccaccatctggaggcagctctacgtggtgagaaaatgagatattcattcaaagcttagaaatagagagtgggcttttttgaccctgatatgccaatgggatgtttttttttctcagcgaaacttaaaagcagagcttccgagacagagttttactcggaattggcaaaggaagcgacatggctgagagtttagcccctgctgggggctgtgtgcccttcgacctgccatgtatttgggtgtattacagtgagctgtagcagaagggactgtaggatgtgtctttccttgcattggaaggagaaatgtggttgtttcaggcccctggaatgcaggatcgggcagtgggtgttgatgtcaccttttaaacagtaataggtgcttatttaaggatccggtagagggcaattactatttttttttttttttttgccgttgtctgacagtaggtaatacctcttatcatttaagaaaaacaacagagtcttctagatttacctgtgtttgtgacaggratagggaaatattttacattctagcttcgtgtgcaattgtccagttctcctgatcacagaagaagtcttattaatgcagagaggttgaagctctgacatcttccatttcgtattccctcggggcatttctttgcacataaattcatatttgcagtagattaccttttgttaagcttgtatttctattcagagtgttgatttctcatatgctaatgttattaccaccaagccagggctctggaaggaagtcggtacgttcatttcttgagaacatagaaaacttcctaaagtcctgcagctgcttgttgggcaggcttgttgtttttgattatacagtggtttcctataaatgcacagtaataagcagttgcagtaattgtcatcaaacgtactgaaaaacctaaaagcgtaaagttagccatgaatgttttgtgtaaatctgagcaattctgtagtcagggtttcatcttcaacttagcaatttttaaacaaaaatatggcaacaaaacaaacaggagttgatgctcatagtcagtggacctacttaagtctgtaaccctagwgtaggtattcttaatgagcaccttggtttccttttacaaaacttaaatttgcctctgatagacttacatggttggatttgtgcaaagaaagctaacccccaaaatggctataatatttttatatgggctgggcgcagtggcttatgcctgtaatcccagcacttagggaggccgaggcggatggatcacttgaggtgaggagtttgagaccagcccggccaacatggtgaaaccccgtccctactaaaaatacaaaaattagctgagcatggtggagcatgcctgtagtcccagctacttgggaagcttaggcaggagaattgcttgatcctggaaggcggaggttgcaatgagccaagattgcgccactgcactccagcctgagtaamagagcgagaccccttctcaaaaaaaaaaaaaaaatgcatttttttgctgcacattgtagatattagcaaaatagtaaggattttagatagttgatacagccttagagcagtggacaagagaaggcagcgtggatattagaaactcctagaaagaaggttaaataccagagtgagctcagtacgtggtttagatatgtagagggggagttttttaaaaaagtggcagtgaacaaatttaatgttttaaagggaccatgacatttagatacctttttatttatttattttttgagatagggtcttgctctgttgcccaggctagattgcagtggcatgatcacagctccctgcagtcttaacctcccaggctcaagcaatgctcccacctcagcctcctgagtagctgggactacacctgtgagccaccatgctcagctaatttttttaatttttgaagagatgaggtctccttatgttgcccaggctgatctccaactcctggactcaagcaatcctcccgcctctgcttcccaaagtgctaggattataggccggagctaccaaggccagcatgcttagagttttatcacattaggttccacctaaatttcttttcatggaaagaaccactgagttattttccttcagataatccctaatctccttgattattgtacgcttgtaattgcaagctgcaaactgttgcttttctttgaaccgtcaatcccatcaaaattcttagaaagtggtaagaagtgtgagttttgcatcttatttgcattttcctcttgtcacaaagcaccaagagcttgtagattgagatttggcctcttgcagaagtgtctcttgtgggttgtacacaccacagtgtgcagcagcccgcccagggtggaatgcttcttcttccctatagctgagctgagagcgaggccgaggagttcaggttctcagtgtgctgagaagggtccagggtgcagggtgttctgaagaccrtatgtaggttgtaggattcagatctttaggctcagactaattccggaggagctttagacttgcccatctctgatccagatgcaggaagctcacgagcaggtgttgacgctcaaggtctagcccctgttgggatcacctttttgcttcagtgggacacaggatgttggatgaagtcttggggattatgcattactttttgttcctttaatcttttaatgtcgcatggaaaccaaattccgtataatatgttttagtttatgctgaaagcaccttttaattcaacattaactaaatctcatgatctagtgcttatacctcatgmgtatttgaagagatagccattctctaccatctccacaatgctgttttataacaaaatctttctgattgggtttttccccgtatagcaagataacagggagatgtttcgaagtgtgcggcacatgatctatgaccttattgaatggcgatcacaaattctttctggaactctgcctcaggatgaactcaaagaactgaagaagaaggtcacagccaaaattgattatggaaacaggtttgtttatttgaaagatgattttacgcttaaattatccaatgtaataacatcactataagtcttcaggagaccaagatcatattttatcataaaacaaaatttctaccatcaaagtaatggcatgtttttcattttgaaaaggatgaggtattttccactggattctgaactggggaattttgtgagccattcttgaaacyttgtcattcttcaagggatagagtcaagaagccagggagcctgtcattttcaccgttctggagggaaccccatcattactcccctagcaaggaacttttactttctgaccatagtttttgactttgagtccagatctggggggccttgcatagtgacaagcaacaggtttctttctgtggaatcccaggttctgagcattggagtggacattagatcactggaaagtttgtcacctgtgtaggcttgccagttttcacaaacagaaatacagcccagttaaatttcactgcagataaacaacaaatagttgctttgtgcagttatgtctcttgccagagcaagagttcttcccatccatagcaggcatccccccagctctgcatgagtgcctttagtgctcacccctgcctacagctgtaccttctatgttagcacgtgttttttgatgctgaaagcaaacaagctgctctgatcctaattctgctgggtcctgtaactagaatgaggccatgcccttttccacctggtaatatttagttttcatagaatagcagagctgcaagaagccttaaaaagtatctggtcacatggttcccaaatgctcttctatttcagaatcactgggatagctgttgaattatagaatcccaagacctaccccttaaggctctgatttgtgatatctgggatgctggctggaaatctccagtgttttttttttgtttgtttgtttktttttgagatggagtttcggccttgttgcccagactgtagtgcaatggcatgatcttggcccattgcaatcycygtctcctgggttcaagtgattctcctgcttcagcctcccgaatagctgggattataggcatgcaccaccatgcctggctaattttgtatttttagtagagatggggtttttccatgttggtcaggctgatctcaaactccctacctcaggtgatccacccgccttggcatcacaaagtgccaggattacatgcgagagccactgctcccagccggaaatctcaagttttaaaaatagagttgggttgtgctggacagcagatttggaaaacttctggtttaattcaaccccctcattttacacattggaatgtggaagtcagaaaagggaaggggtttgcttccagccattcagcagaaaggagtccgggtaaatcaaggaacctttctgtaaaatcagaattatcacataattttctggtaatttatattttgaagtgtgaaaaacttcttaaagcaacgttatgagcaagatgtagggtttggattagaaatgctgtaggagagatttttatttttttttccagaaagcctgagatattagctattgttgcagcaaaacccrtttcaagaccacctgcttaaaaaagcagacttttggagctttgatttgattttctattggagtatcataatttaaacttatgttcagagaccacctgcttaatttggctgcaggaagctagcaaagtacattgtatcatggaaaaatctagttaaggaaggaagtgtttccaaatacagtttactactttgataggaaatacagtccttaataagacaggttttttgcccaaggatctccaggctcttccataatttctccaaagcccagcgctctgcatatatcttcctagttcttccttcagaaaacctaaatgatgcaaaatgataccacagtgttgaatgtttgattttaaggtgggtggatttaataaggaaaagatgttttgcgtctttttcattgatcgcttaggcattcttgcttttttgattgatttttaacctgggtggaggggtttgaggagctgtttgagaatgtgatgaaggtcttggaccatatctctagaaaaatgtacatacacaatacacaaacacaggcacacagacccccccaayacagacacacacacacacacacacacrcacagacagacacagacacacacacacagacacacacacacacacagttctacacatgatttcaggttggggaggtctcccaccctgtcctcatagatgcattgggcttccatggacttcatctctccattgccttgctgtgataagttgcaccttcataatggaaactcactctgattcagaaccagctgaacactggttgctgagaacaatgcgtagaagggttgactgcacaggccacttcgtttgatggtttgcatgtggcattctggaaggagcatggctctgccattggagagttctgatacagaacccaggatctggttttggaataaataacttctccaagcttaggtttcctcctttgtgcaatgggtctgacggtctgccctggcaggtgtgaggtgatgatgtggcaggacgtgcacagcaggctggcacagggccgtcctctcgtgtgttccctgagggaacccaattctgcgtggcctgtaggacctactggctgggcctcctaagctggttctttgtagctgccctggcaccagcactgacgtgcccataccagaactgatcatgcctacactagaagtgaccatgccctacccacagtagtactgactctatccacgcattactgacccctgcccataccagtattgaccccacccacaccagcacaaaccatgcccacaccgtcactgaccctgcctgtaccagcacgttcctaggggccggttcagggataggataaggagtagtatttgggagggaggagcttrctttgttagtgagacatattacaaaaataactaatgagaccttaaaatgctttttacattttctccagatgtctttctgttggtcttgaggcaccctgcttacattgcagccactgcggctgttttcatgcagtgcaaaaagcctctatttgtttaaagtctgtttaccctgatgctgttgacaggcccagttggtcctcctgcttcactgtcagtggaatttgctcaatagatattaaaaggaaaaaatcagttttctgtatttgtcttcccagtggtacagtgcttgagcaaaactccaaagactaaatatgtttgagatgctggcagactcgtatctggctttaaggtgtgtgacctcaagactcgaagtctcagggtagttttttagatggaacatttattggcaattcaactttcctctttaatttgtaactataaagatgttctctaattgaaatttatcattctttcaaatgactctgtttcctttttcatattgttaaaaaagcctgtttccatcggcttgttaattacaggaatataatcctaacrggtaagaggcacctatggttaattttctgcccttagacctgcgtgttttgttaacaagaaagccagaacctactgccagatcacaactcttgatctcttttgttacacagttgtctgtgttctttaaataaaaactgtggtaaaaatcatcttacaattttgttggatttgaggaatcagagagaatattccccaaaatatgtactgtttatttatttatttatttwtttttagtatttattgatcattcttgggtgtttctccgagagggggatttggcagggtcataggacaatagtggagggaaggtcagcagataaacatgtgaacaaaggtctctggttttcctaggcagaggaccctgcggccttccgcagtgtttgtgtccctgggtacttgagattagggagtggtggtgactcttaaggagcatgctgccttcaagcatctgtttaacaaagcacatcttgcaccgcccttaatccgtttaaccctgagtggacacagcacatgtttcagagagcacggggttgggggtaacgtcatagattaacagcatcccaaggcagaagaatttttcttaatacagaacaaaatggagtctcccatgtctacttctttctacacagacacagtaacaatctgatctctctttcttttccccacatttcccccttttctattcgacaaaaccgccatcgtcatcatggcccgttctcaatgagctgttgcgtacacctcccagacggggtggccaccaggcagaggggctcctcacttcccagwmggggcggccgggcagaggcgccccccacctcccgaacggggtggctgccgggyggaggggctcctcacttctcagatggggcggcccgtcagagacgctcctcacctcccagacggggtggcggcggggcagagacactcctcagttcccagacggggtcgtggctgggcagaggcgctcttcacatctcagacggggcggcagggcagaggcgctccccagatcccagacgatgggcggccgggcagagacgctcctcacttctagacgggatgacggccgggaagaggcgctcctcacttcccagactgggtggccgggcagacacgctcctcacttcccagacggggtggcggccgggcagaggctgcaatctcggcactttgggaggccaaggcaggtggctgggaggtggaggttgtagcgagccgagatcatgccactgcactccagcctgggcaacactgagcactgrgtgagcaagactctgtctgcaatcccagcacctcgggaggctgaggctggcagatcactcacggtcaggagctggagaccagccrggccaacccggtgaaaccccgtctccaycaaaaaatacgaaaaccagtcaggtgtggcggcgcgcgcctgcaatcccaggcactccgcaggctgaggcaggagaatcaggcagggaggctgcagtgagccgagatggcggcagtacagtccagccttggctcggcatcagaggcagaccgtggagagagagggagagggagaccgtggagagggagagggagaccgtggagagggagagggagagggagaatgtactgttatagactggacagatttattagccagatgttgcttgtgtttttagttggtgactacatttagccatctggccaggaagttgcttaaccttattgtagataacgtccatatgtttggtgttcacatacaatagaacatctgtattgaaaatcttcctgtggcctcatgtaaggactcgaagtagaaggggagacatgcagggatccctattggggtcagtggggagtaaaaaggtggtggatagatctctcctccaagttttcttccctctctccttcctcaactctctgatgatgtcacaactgccagctatgtgtttgggttgatggatgtatatgtgattgcatatatatgtgaatgtgtgtgtgtgtgtacatatgtagtatgccttaggtggggtgcagwggctcacgcctgtaatcccagcactttgggaggctgaggtgggcagatcacctgaggtcaggagttgagaccagcctggctaacatggcaaaacctcatctctactaaaaatacaaaaattagccgggtgtggtggcacacacctgtaaccccagctactcgggaggctgaggcaggagaattgcttgaacccgggagatggaggttgcagtgagccgagatcgcascactgcactccagtatgggcaacaagaacgagactgtctcaaaaaaaaaaaaaaaaaaaaaaagtatgccttaaaacttttcatattttacataataattagtaatacatacttcacttgggccttgtagatctgtaaaacttctccttgcaagacaaagccactgttgattgcaatggaaataaaaattgaggatttttttttttttttttttttttacttctcccaagakgacacattttaagctaaagaaagcagcctccaagaattttatattcctaatattttgggcaagcccgagtttctaggttgtttttacctgcccagttgctgtggtggaagttgtgctagaaaattcagcctccttggtctatgtctgtgaacttactaaattcttgttgttctagarttctagatttggacctggtggttagagatgaagatgggaatattttggatccagaattaactagcacgattagtctcttcagagctcatgaaatagcttctaaacaagtggaggaaaggttacaagaggaaaaagtaagtttgactctgtcatatgccattcacgttttctcagtaataagttttcaacattagtaaagtatcagtcaagcccaaaattgtcactaagaaagaayctgaaaaggagtagctgcagagtttgtgtcctacagtcatgagtggaatggagcctggtggcacaggatgtcacccatgacatgaaagggggtcggacagcattgtgtttcatcgtaggagacaggatcctaatgatgttgattttgtgttctcatctgtcaaatgagacacaagacttgattctgcatttcctctcggataatggtaggcaggtcatgtattccaagctcattgagggcagagagtacatgtcttattgtcttttcgtcttctrtgatctttaatggtatcatgtatgcattagcctgttctcgccttactataaagaagtgcctgagactgggtaatttataaagaaaagaggtttaattggttcatggttctgcagactgtataggaaggatagtggcttctgcttctggggaggcctcaggaatcttataattatggtggaaggcgaagtgggagccaacacttcacatggctagagcaggaggaagagagagggtgtgcggggggtgctacacgctacacttttaaacgacgagatcttgtgagagctcaccatcatgaggacagcactgagaggatggtgctaaaccattcatgaaaaatccaccccatgatccagtcacctcccaccagtatatatatatacacacacacacagtagatactcagaaattgactaattgaatcatctgttaattcaacaagtacttactgagcatctactgtgtaccaaatgttgaagacataatgatacatgagacagatgtccttggagggtttagtctaatgagggaacaaaaaattaaataactacacatatataatcattattttgatttattggatggacacctgaaagttttgtatctctgaaaatactcagcacagcagttgcacaggatacaattttttgtctgttgtgtgaatgcatgatttaagaatgtgcaggggagataagaaagtgactgcaccaaggcctttgctgggttatgccaatgagttattacaattttctattctgtagggaataaagaaagcaagtgtcagtgatgagtgttgctggggttgactttctgtttccttccatacacagtctcaaaagcagaacatagatattaacagacaagccaagtttgctgcaaccccttctctggccttgtttgtgaacctcaaaaatgtggtttgtaaaataggagaagatgctgaagtcctcatgtctctatatgaccctgtggagtccaaattcatcaggtgggtgacatttcttggctgccgtctttcctctttggttagtgttaggaacttgggatcagaaccactgaagcgtcccattcatgcwgagaggccttggatgaatggctgctggacacgagcaagcagccgagtcaagagctgtcttagacagtgtgatggcagccaggttgggctctgggtcagggtgaaccttcttgcgtgtagattgctatttgctcgtagagttatagcagttgcaggtacactctggccgtatcttaagagtgtagctgaagattgaagtaatactttgtttcctaagttgtcttcgtaagattttatatatcctggtccctcaaatatcactatttccatttttcaaaatttggtttctatgaatgccatttctgtgagttttgtcttgttttttctgcaagatgattggctggaatacatcatttagaatggtgcctgccacatacagactgtcagttaatatttgttaaatgaaaacactgtaagtctattttttcctgcttagccttcagtataactttctctttgcccagatggaaacaatgtggttcaactatgtatgaattatgtgtgtgtctgtgtatatgttaaaactctagtatcttcacttgtattattcaaaatttgaaaacttagtgtatgaatgatacagaaaaatacgagtggattttattctcacttctgataaagactttgtttcctcttgacataggatgcagtttttattttacaatgtatttggtttgtcataggttttgaaataaacatgcattgtgctgaattttatagtattgtcattctaaatgaacaaataggctcttaaaaaaaaaaccaacttagaaataccatttgcaagtagttctattacagtgacaacccaagacattgcacattaaaacttggcaaggtttttgtgctgtggatgttaattgatgagtagctgtatgtgatacttttgatatttataaactcaatagttgtctgtatagtgcacgtacatggtattaattatgaagcaatgtggatgtacatttggtaccctgttatttggaaaattaacttgcttttatttctccatttttcaagtgagaactacctggttcgctggtccagttcaggattacctaaagacatagacagattacataatttgcgagccgtgtttactgtaagtgcacccmaagaygcttagttgaattggctaccattctaaggactacttttagccatttctgtctgccttcctgcgacactagaacatgggtccctgggatgcctgtatacaggttaatttagtattactaagtagagcgcatttccagaaatcatctgagtctctagccacccttagaatcaccgtgacaaagatttaccccattaacatggaatgtgcctcttaaatgtgtatcgtttttatttttttccttgagacggagtcttgctctgtcacccaggctggaatgcartggcgtgatctcggctcactgcaacctacgcctcctgggttcaagcagttctcctgcctcagctcccgagtagctgggattacaggcatgcaccaccacaccttgctaattttttgtatttttagtagagatggggtttccccatgttggccaggctgctctcaaactcctgacctcgtgatccaccctcctcggccttccaaagtgctgggattacaggtgtgaggcactgcccctagcccttaaatgtgtatcttaagctcacttaacagtaattgactattgttattaaattcctttttgtcatatgaataactgattaaaatgataaaaactggtctgagaagagtctcaatccatttttttactgtccttttcattggagcttgcattgaataatgggtctccaaaataatttatggaaactaatatttctaggacctcggaagcaaagacctgaaaagggagaaaatcagttttgtctgtcagattgttcgcgtgggtcgcatggagctgagggacaacaacaccaggaaactgacctcggggttgcggcgaccttttggagtggctggtaatctatttctctgwgtttccttgagagtttcagatcttcacagtcactttcaaaagaatcactgttgaatgttgattggacaatgcacagctgtgatttataagcttttctgctrgagagaaaaaatatatttattagttattttcattgtggcttcaagttgacctgctaggctcaggatgctctagtcctcaagtttcagatataaatcatatatttggttttaaagtggatcccatctttccstgggagtgatcctgacccatattctcagtctgtagggaagccagtcagtggaggttttcaggtcttggtgatggacataagaatggatatgtgcaggacggtcaaagcaacgaagaagaggaagaaaggcaaactgtgaagagaacgcggttagcttcatgttggtgctcttcatccgccatgttggtgctgtttctccgccatgttggtgttcttcctccgccatgttggtgcttttcctctgccatgttggtgctctttctccgccatgttggtgctcttcctccgccatgttggtgctctttatctgccatgttggtgctcttcctccaccgtgctggtgctcttcctccaccctgctgttgctctgttatttttggtgacagcacgaggaatgtgaaagaccaattatctctgttgaggaaagataaaggcatacccaggaagttctgattatttgccctagttcactgtgactctcatttttcatagttttgggaagtggttttctctcttttatggttgcagtacaatttcattacctagcactgtgatatttattttaatttttgtgatttttgggattcatatggatatttatgagggaaaagttcctgattcttgacacatagctggatttttttgtatgaacagctatggaagacattctttcccttggctaccaggaaactctgaacttagtccatcccccctgccttttaaataaacattatttttagaagagttttaggttcaagcaaaattgaacagaaaatacagacagttccyatatatttctccttccttccccctgcctccccattatcagtatccaccatagattggtacattgattacagttggtgaaccgcattgacacatcgtcgccctgtgaagtctgtagtttacattagcgttcattcttgatgttgtgccttctgtgggtttcgacaaatgaataataccgtatattcaccattgtagtctctcactgggtagcttcaccatcctaaaagtcctctgtgctccgcctggaatttttggaaaaatatttcaaatcatttaaataaatgacttactacatcataaggagtaagcaatagcagcgatatagacattatgagagcagcatattaattcaatttacttgaattcartttacccatagagctaactaacggagtgttccaatgattttaccatttgtgagtgaaaatggtgagggtgaggtgttctttctgaagtccccacagccttgggctggggaaatccttttgcattttcatctttctgtctttttgtttttatgagacagagtctaactctgtcacccaggctgtgtgatgacagctcactgctgccccgacctcctgggctcaagtgatcctcctgcctcagcctcctgagtaactgggaccacaggcgcatgccgtgctaacattttcatgtcatgacttgaatacatacttgaaaattgcccctctatttgtcagagcctgtagcatcttttacatgtaatctagtgttatatttaaaatgcctttcattttccaggattgttttttttcttttccaccttgatggtagttttaagaaaatatttaatttttgtctcaggcataattggcttcatttgagcaatcagagacatctttgacaacacacggaagtcgctcctcttttcaacagcagagctacacattctctggttattagattacaagatggattgtgtcataagttcctacgaatgcgtagttatatttcttaaagatgaaatgtagaccacaggctgacagtttttaccttcttttgatyaaaatttttggaatttaaaaatttggaatatttttcagttttcattgggttgatattccaggaaagtctaggtactaatggatggagagggtgatgggcatgggctcagctgacaccactgtggccttccactgtttcttacatgctcacttatgcttgcttggtggggtctagagttaggttgggccccccagctcctggagttctccatgaattacagaagcctgggttattcactggggcagggcgggcagcctggacatagttccttgtttctggagcccctacctgtgtagtgttggctgagacactacatctggtccctggagtttggatgcctggctgtgtggcctccagggacttctgtcccctgatatctgctgatcacatggacaccccctttggtccctggttcctcctgtctggactggtctctggttccttcccttcctgtcttgtgtctctggtacccactgatatcggggcttctgaaaacccacctggggccaagttctagccttgtcgtcttgctcgtgaattttccagagtgtggcttctcctcactgctctgctctgactggcacatggggtgtcccccctcacttaggggttgcaaagaacctgtgtgaacctgcatgaacctgtgtgaacctctataaacctgtgtgaacctgcgtgaacctttatgaacctgtgtgaacctgtgtgaacccacgtgaacctttatgaacctctgaacctgcatgaacctgtgtgaaactgcgtgaacctgtgtgaacctctaagaacatgtgtgaacctgcatgaacctgcgtgaacctgtgtgaacctttatgaacctgtgtgaacccacgtgaacctttttgaacctgtatgaacctgcgtgaacctgtgtgaacctgcgtgaacctgtgtaacctttatgaacctgtgtgaacctgtgtgaacctgcatgaacctgcgtgaacctgtgtgaacctgtgtgaagtgcttcagagatacccataggcatttgttttcctctgtgggaagatttcaggcctgcagctgttaatgttgggttgccgggtcctttgagttctctgtcccttctggtgtcacagttgcctagcagttgctggtttgcctggctccactacatgccctgggtggggatgtcctgttcatcccttggtgccaagcactgagcactgagcctttgtggcctctgtgctcactccagaggggccagccttcctagccctgctcagctggtgtgtgtctgtacattataagtaagaaactggctgggcgctgcctgtaatcccagcactgtgggaagttgaggtgggcagatcacatgagtttgggtgttcgagaccagcctggccaacatggtaaaacctcctatctacgaaaaataaaaaaattagccaggcatggtggtgcatgcctgtagtcccagctatttaggaggctgagggagaagagttgcttgaacctgggaggcggaggttgcagtgagctaagattgtgtcactgcgctccagcttggggaacagggagagactctgtctcccctcccccccaaaaaaaaggccaggtacagtggctcacacctctaatcccagaactttaggaggccgaggcaggcagataatgaggtcaggagttcgagaccagcgtggccagtgtggtgaaaccctgtctctactaaagatacaaaaaattagttgggcgtggtgctgtgtgcctgtaatcccagctactcaggagtctgaggcaggagaattgcttgaactggggaggtggaggttgcagtgagccaagatcacgccagagtgatggggcgagactccatctcaaaaaaaaaaagaaaagaaaasaaaacaaaacaaaacaaaagtaaggacctgatcgttctgcttgtggagtttccagtttcctactagaaactcttctctgagacatttcattatgtgatctggctatgtaaatttttggcacaaaaagtaaatatcttaatgcagtggttctcaatcctaactgaatatgagaaaaatcttgcgagctatcaataaaaattcttggtcaggtgctgtggttcatgcctgtaatcctagcactttgggaggctgaggaaggcagatcgcttgagcccaggcattcaagaccagcctgacaacatggcaaaacctcgtctctactaaaaaatacaaaagttagctgggcgcttggtggcttgcacctgtggtcccagctactcaagaggctgaggtggggggatcacctgagcctagggaggttgagactgcaaatgagccatgatygtgccattgtactccagcctgggctacagagtcatcctgtcccccccaacggccccctgccccgccacccccccgccccaaaaaaaagaaaaaagtcttgcacaagccccactcctgtccaggtaaaccagaatctctactttaaccaaaatcgcttgtttgtcactatgggccactcagtgactggcagtttgctgccaccagactaccttgccctccctgctctgccccgcttatcacatggtggcattcagcacatctggggaattttttttaataggacttgcttctaacttattcagtgtgttgtccaaccagatgttctctttgttactaagaaaggatacttggtcgggtgcagtggctcacacctgtaatcccagcactttgggaggccaaagtgggtggattgcttgagtccagcagttcgagaccagcctgggcaatatggtgaaaccccatccctacccaaaaaaactaaaaaacaaaaattagccggtcgtggtggcgcatgcttggggtggccaaggcaggagggattgcctgagcttgggaggttgaggttgctgtgaaccgtgattgtaccactgcacttcagcctaggcaacagagtgagacactcaaaaagaaaaaaaaaagggatagaagggatgcttcccacatctgagaaggttgatcaacattttggtaatcgtattctatctgttcataggctacttcaatttccacatgcaaatttaattttgaggctttctttagaatgacttctgcgtgtctgtgttaacagagttcagttccttaaaatgagaaagtgtccatggacctttaagtctacagttcttagtcttcggttgaaaagaatgtgtcacatttctgtcttttaacctttttataatgtaaccttttctatctttttctaaaagatagaaaattgtaaaaataatggaaattttatggaaaagtgtagttaaataaattatccatagttttacatagccagggtagtacctcatgtttattctgatatgtttgtttccaaattwttttttctgtgtgtggcatatgatttttaaatacaatatcccgtcctaccatgtatttgtttatttaactgattgattttttaatgtctttttagtcccttttttgccatcttaaccatttttaggcgtgcagttcagtagtaagtatgtttgcattgcacatacttttatctttctaacaaacctagcattatcttatgaacatgtccttttattaagcattattcaaaaattcggcttctcaatggctgcagcctgtagtcctgtgattccagcagtcctttgctttgggctctgaggttatctcagccttgcggtgtagtagctacgcagtgagcatcctggggcttgaagcatcccacctgtgcctgtttgcaggccagcccctgcagcggagttgctgactcgcagggtgtcggggtccatctgccgtgagcaagtcatcctgatgcagccccaccagtgggactgagccatcagcccctctccctgcgagacgtttctcacctcctgccttctgctctcctgcctgtgctggccctgggcctctgtcactcttgtcccaacgccactgcctccttccttctcctgccctctgtcttccagcatcacgcggtgccgtctgtctacccggcctctccctcacacagctgtactgacttcagctggactctgtcttttcaccatcctcttccctgaatgtagagaccctgggctggctggctgggggaatttttcccccaagtcctttatttcctcctttggtgtcagggacatcttgtccaaactgcagggagcactccctctgcgtggggctgtgtgcggaagagcagtcaggggagtccctgggaagcgcgatgagcggtgatgactggygacgtcaaggccttctcctcgaggctcaggatgggtgcgggactcggggtgttttccacctgtgggtgctcaggctctgattgcgtttcccrcttgtttgctgccttcctgcacatggtcctgtgttccagggctgggcactggggatgtggcaagggagtcccatggtcagctggtgagatgagtcccatggcagagcagagctctgcaggcacccagcaaggccacccaggaccagctggcatgtgagggtgggcctgctcgggtcagactcccttggttctggctcatcgtgggctgctgcctaaatgagtttattgaaggatgctgaactggtggtctcgggcatcttggaaaaaggtaaaaaggtgggtgctgcagtcagtcgcgtgtgggtcagtcacccccaagagtgctggaagctgggaaacgcttcccccaggccaggtgagggcccgtgtccagaccatgcatcctctgagcagctgtcatttgatgttgcaagttatttgggattctttgacctgtatctgcaaacacagccgtgggctcctggctctttgaggccccttggttgagtggagtgagtgtgggtgtcgtctcttacgacactgctgaggcccctggggccccaccagaccaagcaggggatgaggatgctgcttttttggttctatgtatccctcctcctttttggagggtggtgatggtgatggtagaaaggaaaattttcaatatatgattacttacatgttggacaaaatatatttagactgatcctcttacctgaacgcagagctgggctacagagagacccttctggggaaaggtcttgtgcgaagaaaataaacaaggcatcttcctctcaagtccagtgtggcggtggagcagtagcagacacagggaaagtgacccgggccatctggggttattcttggactttcttgttctgtcatgaccaagggcaaaaggaattgtttgaaaggtagacagtgtgtctgggtttacccctgaatgtcatcagggaatgtcttttaacacaagaagatggcaaaggatattagcctttcttgtgatgttagcaagcctggatctcccggggggtgtgtttgtgaaggcagtttaataggattgaaagagcttgggtcttggagactttctcgctgtagactttgagcatgcttgttcatgcctgtctttgagcctcagtttcttgtcagtatggtaggttactgaggatttgccttgaagtgtcctcttgaaagagcgtccacagataccagcatgtggtgggtgcttggtaaatggtagctacttgttggcttaattgtttgcgggaaagcaaaagtgtgaggcttcagaacagtgctggccagcgtggtaaccacttgtcacatgtgactagttaaatttaaattaaatgaatgaaataaaagtaaattttcagttcctccatcacgctttctacattttctttttttcttttgttttgtggcagggtctcactctgtcactcaggctggagggcagtggtgtgaattctgttcactgcaacctccacctcctgggcccaagcaagtctcccatctcagcttcctgagtagctgggactacaggtgcacaccaccacgcctggataatttttgtatttcttgtagagatggggttttgtcatgttacccaggctagtctcgaactcctgggctcaagcactgtgcctgccttggtctcccaaagtgctgggattacaggtgtgagccactgcgcctggcctatgctttcacattttcgttgcttgttgttaatggaacattttccatcattacagaaagttctattggacagggcagctctagggtgacagttgggtaataggcaaaggaaattattaaatggaactctgccatttgagccccaattccatttgggccagcattttctgataacttaatttgtctttcaagcatggaaataatttagacttgactatgagaaaacascttttgctgttgtttgccagaagatattctgatgttcctttgtttgtttgtgttctgtgattatagcatttaagccaaaacaatctctgttctctttttgtctccagtgatggatgtaacagatataatmaatggaaaagtagatgatgaagataagcagcatttcattccctttcagccgtaagtatgragcaattcaagtacttasccagatataatgtggaaaacataggcttgtaataattatctttataattaaatggataaacataactaaggattgattattttgtaattatgaaaaacctctttagtcactgctgtagtacatggaattttttgtagccataagaatcctgggtcaaagtttgtttatggtcctggaagtaggagattttacttgtaatcactgaattgccttatatagaaggcacagagttacagctctgctctgagcctgaatgtttctttacataattgatttattctagtagctatttgtattttcaaagcacaatacttccaaattcatcataggaggttgctgtttttaaaataaaaaaacaaacaattatgatgaattattttaaagcgagaaataatgctttaaagcatataatcacactgctgatttttgtgtctcggtttttgcttagagtggagcctatctgtgttcgtttttaggctttctctagttctgacctgaagtctttaaagaggcacggaagctgagaaaaagctcttggaggagattcattaaattgattatctgatttgtgggtagaacccagggaactggtgggaagaactggcgtttatttccctcgtgtggaagcaagagtgtacccagatgatggtcgttggccacttaagcactcctactcctcacagaggaggagagaaaaaggaatccagatggttgaggttaattgtaagagacagcttcctcctgggcgtggggttgggtggcgatgttaggggagaaggcatggtaagggcagtggaagccacctgccatagtgctctgcagtttcacttttccctcatttttattcttaatcgacttcagacttgaaacacatttcagattttagaaattttacggttttcagctgttggctgaagggtttaggaggcgggtagtaattgggtggctgaaggagccctgtccttgggggcccggagatgtgaggttgacttccctctgccccacgcatccttggtgatggaccaccgcgctcaaccccacccgactcctctgggtcttgagtgccactggctaagacaggaagagtatggctttctttgcaggcgggcgatgtggtcacatagcaccctaaagctttttgtacagctcagtaggagattttgctatcttcttgacgtaagaataacagcaaaccctgcgttattgagctgggagtcagggttaagttatatgtatctcagcatgcacaactagaggcaaaggtctctttgtggcttaaatgctttaggtttactctcctgtccaatatggtaaccattagctccatgtggctatttaaaatacttaaaatgagctgggcgcagtggctcatgcctgtaatcccagcactttgggaggccgaggcaggaggatcacctgaggtcaggagttcgagaccagcctggccaacatggtgaaaccccataactactaaaaatacaaaaattagccgggtgtggcggcaggtgcctgtaatcccagctacttgggaggctgaggcaggagaatcgcttgaacccgggaggcagaggttgcaatgagccaagatcacgccactgcactccagcctgggcgacagagggagattctgtctcaatgataatagtaattagaatgaagtagcattaaacatttagttcttcagtcacattggtcctgtttcaagtgttcagcagcaggggaggtcagtggccccgtcctgggcagcacatacatagcacatctccagcactgcagaaagctctgctggattatgttgttttgtagtcccayccagtgaggagagtttataaagggaacacagtgctgcagaatctggaagtttccttagcaaacaaggggaacagtatcatggaacatgggcagatattgaggtcataaataaaatacacctttgtaaaattataatattaaattgcctcattctctcatgagaaataatgcagccccctgctgttttgaatgctgtattatatattagacctcagaggttcttgatgcccagatgtaacactaagttgaaattacctgttgcctgctagtgtcctctgtgaaaagtcaaaaacaaaaacaaaaacaaaaacaaacccaacctgagggattgtttgaaaggttagggaggttattagttttagattcactgattttcacagaacatgttatgagttgtttgagattgcctgtgctttgacgccatctttttctatcttgtagtggaatgtccacttgaaaaatatgttattccatgtgtaactcttatgtaatttgtgactccatgctccattaaaggaagactaatagacagatgaatatttgaagtgttggaaacaaaagaacagcatgatttttaatagcaaaataagcagtgaaaccagttctttgggaaatgtcgtgctaatgaaaccrttttttgctccattaaaactgatttattatctcacagggttggttttagagaaggaagcacattgcacatctccctccctccctgtcttttttaacttggtgamgtaaatgacaacagtcttcagttccctcgagtcatgtggctcaagtgatggatagcactgtccttgttcccaggattgattttaaacattatggccatgctgtctattttcttgctcatttcatagtgcacttcgctgtgctacatggtatttctatttgggcatatgccccccgtttgtagccagtctctcgtacagcgcagcatctgtcacaggctcctggttcatgggccctgaaaacgtgggtggtctgtgttcataacagcgccacacgtgggactaggcagtggtgttctccacacayggtaccattcttctcacatgtagtcactygagggactattgtgtacgtagtccaggagggtagagtagaaagcctttgcaagcagttaggttccagggatttttttttttttaaatcttgaytttgcttttccctttagatcaacctgccccttgacctatgctatgttcagaattaattgaaattggaggaatggccataaacattctttgggattaaatgcctttcaaccatgtggctttcagacaagctcctttttttaaacacaagagtctgatggagatgcagtggaggcctggtgcacgtttattcctggggagagggttgccctcatttgctctgttccctctcgtggttcagcattttcctgatcaatgcttttccctgtttctcttgtcacctctcccatcctttgtcgtgcgttgactcatgatgcctccctctcgcactcggtgacgatgatctcttatgttcccttgttaccgtggcccatgggtctctgtgcccctttgtctcctgtggtcttggtcgtcccgtgccctccaggctcgcgttggacgacgccattcgacacaagccgctgaacatgtcatcccgtttttcacccagggtggcaggggagaatgacttccttcagactgttataaacaaagtcatcgctgccaaagaagtcaaccacaaggggcagggtaygtattttcctattttgtttctatcagygtgtatttgcatgcgytggggcagtgctgtctgggttggttttagtttgatgttgatcatgatggtggtgataatgatggggatgacagtgatcgtggtggagaatgtgtgtgacagttgcccctgtgtacagtgcatgatggttttcttrcccrtcacctttgtgaacattgctgagagcccactcctggatggagagtggggtcagattagaagtttagaggaacatgcaggcggtaggcgtaactccctctgcccgtgttgtgtgctaatctttgcctgttctgggtcttccctgctggtctccctaagaaggtgatttcatttgtgcagacttgctcccctgagttctgtcatttaagtgatttctccgcccctacactccgcctcacactcactgtttttaatcctgcactgacacgtttctgagcagctgacctgctgctggcagaaggaatgaatcagtcacctcgggctggtgacagttggcacttggctggccaggagggctgccaggaaacaactgtgactgaggccccgcctccagcccaaggggaagtcaccttcagaacttgaccrtctcrctccctgatccatgcagactgcccgtaaacgcggtagagcttaggtgaacagacctgcttcatcgtccagctaccttatgtcactagacttttaaaaaacaattatcttgattcatttccactgttctaaaggagaatgtgaattgagcctgaagaatgttttagagaatgagccttcctagggatctgcagggacctccagctttcttctggtgtgaactacccccctttctggcaaacagtagcaggacaaaaaccccaacccagaacgttaatgagatgtggcctctgcagacagagcgattttcagctgacccaggacccatcttctcctaaattaacagccctcccaatttacactttaattgaaaaccacggggaggtccaattagggctgtttagattggagtcactctcaggctgggagtgccagtgcaaaggttgccagccgatccttcagtgcttcgagctgggactgccctcggatctccagtttcttttgcagtcatcggagttttgataaacttttattagagtcattcagggaaagtggagtttggtgtcaggccagcaggaaatcactgggaaagaggaccagaagcctgcctctgccaggctcactggtgtgtggccaggatctttgaagccggcgaaccttgggctcatgtccgggggtccagttccttgaacttctgggaggagtgggcattttcaagtcacagtgaaaactgagggagaagaacagtgatagttttgtcaaggggatcacaggtgacttcctgaatcagaatggccttaggcaacatgactagtgcttgttttccttgaacctgaattttctccagggcacaatggtgggtggaattcaggtcagaggtgagtgatgtggccagtgagggcagccacacagatcggccgccgggactgcagggcgctgcccaccggcgctcattttatcaccagcagcccaggcttaacctgatccttgcttgtctgtcaagtgactgttagcggccccaggagtggaagggacatggaggagatactcatcttcagagagaaccactgggttttttcacacctctgtccacatgcgcctcctgtctcttgagctcaccacttggccttggccagtttttggtttatgccaacatgtttcctcttcacaagagacaaaaatcctgaatatttaatccaaattattctgatccctgaacccagaggtgtgggacattttatgtggacagtgaattcatgaagactccagacatctggttctgttgtttgagatagaatgtatgctaatcctctttgtttttagttattctgcttaagcaaatgtcaaccccaaatgcacttttttctcctgtgagaaaagcatttaaaacacagcataatcaggaacatttaatttccatttttaaagcgtgtggtaataaatttaatgtgtcactagtgcattagtttatgtattaagatatttgcgcaggccggcgtttctgagaaaggtgtttgaaacacaggatttctaatattaagtgttaagtgttccatcctcatgtctcaacctttgacctctgtagataatgacctcaccacatcctgcaatccttcaaagagcatctttctgtaagatttattttgtggacattcattctccagggaggcttttggactcaaactcctgagatttgagaaactcttagctgcatcctggtgtcccagggaagaccagctccctgtgagccacggtgccagttcctcaggctcttctgtcagggtctgggctttggtttgctctcccggaggccagkgctgggggttagggtgaggaagtgcctggccctttgcccatctgtctgcttacctattctgcaggtctggagctgctgttagctcagggtgcttttgtgtgaattagaaaaaggggcctcatcaaccaggtgagtagggagatgcagccagcgccaggacctgtggctctgtgagcgagtagaggcagggtttagctcccacttgccttttgtggtcacttgtctagtgaaatgcacattctgggcagtggtacatgtgctcctgtctgggtgccatccccgatacctctttggggaccgctttctattggtgsttcttccttcttcaaactctccctcccatgatctggaatttcatatcttaaaaagaaaggaaaaagaaaaaaaatatttttaaaaaaaaaaggaaagaaaagaaacaccaagaagcagtcctaccctgagtaatacatctgtcyctgtctatgtggcctctccctctggtcttcgtctcccattcatcttcacccttctgcctcccagcatcggccctctccctgagcgcccccgccccctctgcccccgtctcccaccaggagccctgtggctgcatgggcaccatctgtcccagtttyccatttcccctgttatctctgaggtctctgtccccttgtgagctctcaaagtgggcctttctcctgcctcttcggggctcttctttccttccccactctgggtgcttgcccttcaggcagctctgcctggagcgagcgggtcttcctatttcaaggaacggtgcccccgggacttgctagtggttgtgcctgcaaggggcaccgtctctgtaagctgcgcctcctcctaccccaactccccgtggttctgctgacttgaccttcacgctggtccctctcccaccctccatagtggcattcacgtcctgccagccagctaggatcatgcggtggcctccctgctgcgattccatccccactgtgcyctgttctcctgcctacccattccctgtagccacagggtgtcaggtcagagcctgactcttgttcctgagccccmctctgggtgccccccatccttcagatagaccacagtccctgccaccccagcctccgcactgtcttaccacagcgtctgggggctccacctcccctgggtgaggacaggcctgcagttccctcacttcctgcaggtctcagccccgaagtcccttcctctgtgacccttgagactgtggtcccaggatgccttgcagtgtgctcaggacttctcccrtgagaacttcgcagttgcatatttctctaagagaccatggagttagtgtttgaccgttggcaatggaagctaaacacctgtcaggggaggtcgtgagggtctgycctatgtctccagtaggtgcagtgcccagtatttgcctggcacatagtaggtgctcagtagctacttttgaataaattagagggactcactagatagcaagaggaaagggggtttcaccagctggcaaagaacaaaacatcatcagtgacttttgacttctcagctccagctaatggaaatctgagcaaaggagaatgccatttccaggatagcggatataggaatgggcagccagaggacagggcgtgaggtgcgggattgaatcaagcagkgctgctcccgtcagggacagcyggaggtgccggcaccgctgtcrgttacctcccagtgctgctcagaaggcaggctgctggagaacaggcctgtgactgtctcagttccttccacgcagggcagggcgctgagctgagggtgatggagggcaggttctgctctggaggcatctgaagaggggacagctgcacacacacacacatacacacacacacatgcacacatacacacacacagatacaaataccacaaacacagacatacgcacatacacacacacacaccacacacacacacactaacacagatataaacaccacaaacacagacacacgcgcacacacacagatacagacaccacaaacacacacacagatacactacacatacacacacacagataccataaacacacacacagatacaccacaaacacacagatgcagacaccacaaacacagatacaccacacaccacacacacacacacaccacagacacacagagatataccacaaatacatacacacgcacacacacacagatacagacaccacaaataaacacagatatgcagatacagataccacacacacacacacacacacacagatgcagacaccataaacacagatacaccacaaacacatacacaccaacacatgatacaccataaaaacagacatacacacacagatacagacaccacaaacacacacacacacagatacaccacacatacacacacacacacacacagatgcagacaccattaaacacagacacacacagatacagacagccccttccactcagatatacatatagacacacacagacacacacatgggtatagacacagacacgcacacagacatatatatatacactcacacagatacagatatacacataagcacagatacagacacagacatacatacagatacagacacagacatacatacagatacagaaagacacagatacagaaacacagacagacacagatttagccacacgcatacagatacacagacacagatacacagagacacacacagacacacacgtgtacagacacacatggacacacagacacacacacacacatgcacagatacagatacacagacacacagtgactcacacagacatacgcacagccacaggcatgcgcgcatacccatgctagtagcagaartgaggacagaggctttgatgttctgaggggcagatgaggccctaccaagctgagtggggggaagcaagcaggcagcccccystgaggcctcagggacagagcacccccatgtgctggcttatagtgccagccccttcccatggggggaaaagatgccgtcgtcgtagaagacagctcaggccgagcccctgcctgccccgcctttgacttgttggaatgtgtggcttgtttccttgtactgtcacctcctatttggttgctactcagtatttatacaaaccacagttctttgtcagccttgcagggaggaagatcccgcrcacatcccgcacacacgcccttacacatagaccccaccgggtttactgccctctccccaggatacccctggcatctaggtttagaggctttgaaagtcttcatttctctcttggagaaaagagccgagagcggctggggctttgttttcttttgcggtggcactgtggtacagagggcctgggctccacaggctgcacctgtcctggctgyggagggctgtcctgctggtggccctgcagactggtgctccactgctcgcccaggttgtgtgatgctgcttagctacttgaaactttgatgggttctcgaagctacgaattcacctccagaatcctcccctgcctttgtctttcctgggagactagaaaatgacagacttctcagccacctcctagaaaaaggtggcctgctgatttatcttaaatgtctacccactcaaaagagacattggtccttggcattcctcagcagcacagtgggtgcacagcagctgctgatgtgcgttcagctgtctgtgagtcaccctagggcagggctggcatcccagctcgttggatgcatggagtccccacgacaggcaccttttgccttgcccctctctttctcatatacccaccttttctctcaagatgttgaattgtgaattaaaagtctctcattcattgaaattggtttcgtgaaaacttctaaaaatgcataggataaaatgcgacttaagagcatccattgtttttccaggtttgtgggtaacattgaaattacttcctggagatatccatcagatccgaaaagagtttccgcatttagtggacaggaccacagctgtggctcgaaaaacagggtttccggagataatcatgcctggtaagaactggcttgttcagggcttctcagcatggcatgggggtagccggccacggaggatgacgtgtgggcagcatcatgtatgagctctggcaaggaaagggctcagctcctggtaggtgaccctgtaagccccagcatggttatggatcatggggctgtgaccggagtggtagaatatgctccctggycccctgtacccctggatggatcagctctccccagctgcaaggattgtgtgaggggggcgtgggcacccagcaaatgtctgggtagacatcaggtcaaaagaagaaagaggtcagaaagggagctgcccattgtgaagcccacttagggcaaatggcagggttggatggtcgctgaatggaaatgcctgtgcctgcgcccgctcagctagtgtacgttatactggcattcctccatgaattctaagtcatgaattctaaactgaccgataacaggatttgcgtgttaacattaatctcatatttacataatacttttcattttccaaataacgttcctaataatctgatttgatcatcaagagatctttggaagcatgttaatttgtatcctttatatccgtgtgatactttttggtttgcaagtaatgcttacgtggcttggcagggcgtagtggctcatgcctgtaatcctagcactttgggagttcgaggcggggggatcacttgaactcgggttcgagaccaccctggggaacatggcgaaaccccgtcttgacaaaaaaataaaaaaactagctgggcgtggtggcatatgcctgtcattctagttactttggggggctgaggtggaggaatcacttgaacctgggaggcagaggttgctgtgagcacagatcacgccactgcactctagcctgggcgacagattgagaccctgtctcaaaacaaaactaacttgaaccacgtgaggctcttggaagcccacaaattggtgttgagtgaattcctatccagattaaactgtagcctaaagtcgctcagctaatgagccgtggaaacggggacaaactcccccatattcaacgcggcctccttttataggcctgtgctgtatagccaggagagtggtggctattcagggtgcatgctgtaggagttactgctttgcttactttagtgcaacttcaagacacattctttctactccttttgtctttcagggctgttgtgggtcattgaatagtcggtctggtaaatccatatgaaagacatctaaattggttaggctaaataatagctaggcttacctgtacagaaagaaaagcatgacgtttagtcaattctgaagctattgcttgtgtgtgtccagtctatatgcaggaaattaatttaggtttattaatgggagtggactaatttgtatacttattatttgtatttgcatttgagatacagatttataaattaggatgaagcaattggcaatatgcatttatcttggcatccttaggatgtcctcatgttcaaagggaaactcagaagcttccagttcatgccaatagtgtttcccttatgatggatagacttaaaaactaagtctaggcccggcgtggtggtgagtgccaggtagtagctgctagtagcaggtactagggaggctgaggtgggaggatccctggagcacaggaggtcaaagccgtagtgagccatgatcacaaccactgcactccagcttgagtgacagagagagaacctgtctcaaaaaaaaaaaaaactaagtctaaacttgtagatcatctcatgatagattcatagggaaatgatacagttgaccattgttctggcaggttccatgtgctgagtcctcgggtatatatctcacaggaagtgattctagcttgggtgggtcatctgcgttctctgttggccgagtaatcactggccgcgctgtgggcaccagagagagagagagtatgggcggttatcagtctgtctcgctgtctttagcctgcagaacctgtgtatcacccggttttgtcactgtctgcagggatgcgcgtcttctttggacagcgcagagcctgtcccatcacccagcggcctgctctgctactttctcatagctcgttggactcctggaatccttatgaaggatccaggcaggcgatgccaagttttcctttgagctgggaaggtagcaggagtccactatgtctgcttctagttccttcttccccagaatgttctgtaacctggggaggcatttgatgagggtctatggtgaatgcccatttgtggggtttgcttactgtaaatgaggtcttacttctgtgctggccctggagtaacgcacttgaggtgtacttgggagtgaggctgtgggagtttcgccctgtcacccgggctggagtgcagtagcacgatctcagctcaccgcaacgtctgcctcccagtttcaagcagttctcctgcctgagcctccggagtagctgagattacaggcacgcactaccatgcctggctaatctttttattttaatagagacgggggttcactgtgttgcccaggctggtctcaaactcccgagctcaggcaattcacccacctgagcctcgcaaagcgctgggattacaggcgtgagccactgcacccggccttgaagttcttttttgatgatggtgtttgtgccttgatagaatttttaggctgagagatcatggagtttatgccttccttatcagtgaggctgtttagtggtgctggccttggaggstaagtgacttgtccraggtcacacagcaaatgagcaacaagtcttsgttgggtggccttgcacctgcccctcgtcctgtgctccacggttcttctcgtggtcagtatcagtgggcggcagccgcgcctccttccacacagctactgtggctgtggtggcaacccactgggattatgatgataatgacttttaaatgaaagcttaatttaatagttggatacattaaaagccaaaatagagcagtttaaaagaaaaaaaaaagccaaaacaagaaagcaaggagcaaagagagttattttccttaagggatccttggtcttcagccagaatgggcatttgctgctcttgacggaaccgctctttggctccttgggagagcgggtggtcagggcgtgggaggtggccaggcaggcagcagaggagcagtggctgggaacgaggcttcctctaaatcatgttactaatgaagcttgtgaagttctcccagttgggccattaccaggggcttcctatgttctcagtaggaagaagagtcttgagctcatttcttgcgttttttttmccccctacaattaaaagcccatctcactttaaaacagacaggtctgttttgttcttctctctgtggtccccattcgggatcctgatagctgcctgccagaagggaagagccatgcagaaagtttctccctagacccrtttttcctccctgattctaggctggtgatcctcattctttttttctttatttttattttattttattattttaagttttagggtacatgtgcacaacgtgcaggtttgttacatatgtatgcatgtgccatgttggcgtgctgcacccattagctcgcttttgagacggagttttgctctgttgctgaggctggagtgcagtggcaggatctcggtttgcggcaacttctgcctcccgagtagctgggattacaggcctgcaccaccacgcccagtagctaatttttgtatttttagtagagatgagggttcaccatgttggccaggctggtcttgaactcctgacctcaagtgatctacccacctcggcatcccaaagtgatgggatcacaggggtgagccacctcgcctggccggtcctcattcttaatcarcttttagttcaactcttggagtcatgcttttaagaagaatgcataggaggcaaccttgccagttacctgggagtgccagtggatactgcgatagtccttggctactgaggactcagacagccgtagccagccgtctaacaagggacaatggtgtgggctgccatgggtcrtggatgccatcaatagtattggagccyctctggttgtcggctaccctgagaggggtagagtgtcctctgcccagatgataaccaagcagatcattggaaactttgagatttttcctctttctagaaaactttatcatgatgaaaattgctcttgtcatgtatttaaatggtgagactgttttgtagaaaatatttcataatcatctaatatgtatttgtaataatctatgaggataggtagacagtcttgcaaaattcacaattacrctattaataatggattgttttttaaatgtatgatttctcccccctcaggtgatgttcgaaatgatatctaygtaacattagttcaaggagattttgataaaggaagcaaaacaacagcgaagaacgtggaggtcacggtgtctgtgtacgatgaggatgggaaacgattagaggtatttattgtggcgagggctcatctgkagtrtttcagttttacttgycaagtgctcaccttggctctgctacagcatagatgtcgtcagggtggggctttggagtcccgtttcttgggattggcgttggttcttgtttccttttctccagcttgccatgcagggcctggggtcctctggtcctggcagctggcctatctcaggaggtccctgtggtcttttttttttttttttttgagatggagtctagctctgttgcccaggctggagtgctgcaggtgtgtgccaccgtgcctggctaatttttatattttttagtagagatggggtttcaccatgttgacctcaaataatccgcccgccttggcctaccaaggtgctgggattacaggcgtgagccacagtgcccgagcaggtccctgtggtcttgaccacctttgcccaaccttatcgtggagtctcatttgctgtcacaagcccaaggcctaaaggtctagcagtcacactagaagtacagataccattgttacgatttgagagatgaagaaaaatgaaggccctaagaaatcaattaaattgctcagcgttagagagctctaggggtggaactgagcacctgctcatgacagccagagctctgacctcgtgctctacctaccggcgatcatgaagatctgcttccgtggccacagcagcctgcagggtccacctgggaggtacttagaagctattgcctcctctgatgaccagaggtcaaatcagagctgctgtccctgtgaggtgcctctttgcaccagtgctggaggactgggcttttctgggcccatggggttgtgcctaaggctcagtgtcgccaagagaagcatkatgtctttctctctgggtgaacycygtccagcatcactgcctgcctcgtctccctggaaacataggtgctgcccttgccactggtctttctggytggagtgaagcaaacagtgttcatggctggaggaaggggaggggagggttcccacyttttagtctacagtccctcaccctagacctatgggacggatcaggcaacttcctgcagatcctaatgttaaagttattagggttgagggtytggggaactggaggtsagtgtcatccccatgtgtcataaccatcaagatcttcaatgtgtgagaacaggggttggagctggccgctggcttcaggtggatctgtgcttcccttgcysggaacgtgttcatttgtggtgggggtgtrttggtgttcttggagcgtacctgtccccccrcatatatagtggragatgtatatggtgtcaagctctatgaggtcttacgtgagctctttatgtcttcttttaaagcatgtgattttcccgggtgctggtgatgaagcratttcagagtacaaatctgtgatttactaccaagtaaagcagccacgctggtttgagactgttaaggtattatttacatggtcattttatcacatggcgctgattatgaaatgctcatttgtaacccaaggaaacatcctaacatcctcctcagcccgggagctgctccaggcaggcagagtgtctcccaacaaagtcattcaaggttgctaaggaaccacactggtgtttcttagaatacatttactctcatctccttttggacgtaaaaataggacrttcatggagacaaatgacagagtctttttaagatagctrttgtctttctcttcccagtactgttttatgtgtggcatgctgtctttacaccaaacaaaaaaaccgagctgccagcctgtggaggtcattgctggggagtgggatcctgttctgtagctctgatatggtgccttttcataatgcagcgtgctcacatctccacgatggagtaaacacygtctcaccgccaagagcttgaatatttgaaaaccaggccaggggttggctctggaatacagatgtttgatgtgagaattagggacaatttttgcttagaggcagcatgtattaggtcttttttctttgagtgtaatgtgacaacaggaaagcttttttggcgcagctgtgggcaggtcaccacagctgtggaaggaatatagacccttccaggttggggctaagaagaaaaacggcaacttttctttttttgagacggagtctcactctgtcacccagactggagtgcagtggtgcaatctcggctcactgcaacctccacttcctgggttcaagcgattctcttgcctcagcttcctgagtagctgggattacaggcatgtaccatgatgcctggctaatgtttttggtatttttagtagagttggggttttatcatgttggccaggctggtctcgaactcctgacctcaagtgatccaccctcctcggcctcccagactgctgggattacaggcatgagccaccatgcccggcccaaaaacagcaacgtttaaaagtagaatcttggccggatgtggtggctcacacttgtaatcccagcactttgggaggctgaggtgggcagatcatctgaggtcaggagtttgaggccagcctaacatggaaaaaccttctctactaaatacacaaaattagctgggtgtggtggcgcatgcctgtaatcccagctactcgagaggctgaggcaggagaatcgcttgaacgcaggaggcggaggttgtggtgagccaagatcragccattgcaccactctagcctgggcaacaagagcgaaactctgtatcaaaaaaaaaaaaaaaaaaaaaagaaagaaaaaakaatcttaacagtaatggtcagagcattcagaaaaaaaaattcagctgtgtcayggagtcagttggcttggcagctgttacaatatgatacaaaattttgcagaggcattttgtctttggaaaaatcatataggggactaggtgtacagtattttcaccactgcagttagaaatgtttacagttgtacctgatagctccagttgaataaagctgttacgctggatgatattgataacagtgcttaaacttctttttcaattcttgaaggtggccattcccatcgaggacgttaaccgcagtcaccttcggtttaccttccgccacaggtcatcacaggactgtgagtagtcaarcactttcttcccccaagtatttttaagggagaactgggggaaagcgcgagaggccactctcagttgttctggaactcgctatcataacacaataaggctcatttcccaccggaacctattccttggaaacattcttctctcttttccttgagcagatctcaggaggagatcttaatttccttctccagttcctcctacccagtgttgctggtccccttctttcttttgctttccagtcttccgtgttgacttgccatccatccatgccatccatcagaaaagttactgagctgtaacaaatacctctcaaacatgggctcttaaggtgcctgtcttagaattggaaatcttgaaccctttttgtcttccttggtggcccttgctgtctggagctcagggatggcttttctcatagacatttttgtgaatactgaccatggtgccaagactttaggaggaaagaactgctatttgaatcactctccttcaaaaagaatttattattgatgactgaaatttgttccatcacattttgttaaattaattgtcaactaaagctgtagccctgtgctagacagtaagatatcacagaaggaaaacatgattcccrtctttcagggtgtgtgtctctttggcattgggaactgagacatattcatatttgggacaataaatgacaaagagagttggctacaggcttgtgtgccgcaggcagttaaaggaaaagagtggtgtggagggcagaccgccctttgtcactgatgaccccgtgggggtcacaccgtgcagtgggcagtttcaggttctgtgtgctctggatggagcttaagcatgagcctcttctgtatcttcatttgaggataagaatacctttctggctggtgccgtggctcacacctgtaatcccagaactttgggaagccaaggtggaagattgcttgagccccggagtttgagaccagcttgggcaacacagtgagacccgatctttactaaaacagttatcctggtgtgatggtayacctgtagtctcagctgctcaggaggctgaggcaggaggattgcttgaacccgggaggcagaggttgcagtgagctgtgattgcaccactgcacttcagcctggggaacagagtgagaccctgtctcaaaaacaaaaagcaaaacaaaaaaaacataaaccttcctcctagggtattcttgaaggtcaggcaaggtggaggctggccaccttctggcacgctgcctggtatggataggggctccattgtagttgctgctgctggaataatgtgttcattcacctgactgtttctggggcctggcctgccctgggccctccatgtggggtgggtgtgcctggacaggggggctgcaggagagcagcctggagagcaaatgcacgagcacggtcatgatgttatggtgtgcagatcatcgagaagcttgggcctgctgttgttcaggggagttggagaggcctggtgtgtggtctgcagagctggggtgccggcccatgactgtcaatggcagatgtgtgtgtggtggggcccggcctgggatgtggctgactggaggggtttcaagcagcatggagtgcctggtggtgggtggtgcatggcgggggagtgcggggggtgggtggtggctggcagctgccgaaagcatcattgcattcctgtcctgtcccaacagtgcatgcaggccaggggttcagttacaagggcatcaggtttatgtctaacgggagaagcaggggcaggaaggccgccagcttggaaggcagttccctgccatctcatccttgccccaggatcagatccaggctaccagaccccagaccaagtcggatctgctaatggtgcacaacatccttggtggccgaagctgtaggataataacaactatcagcagatgttggccatcgttcactatgctcttatcatgtgcccgacacaagaagtttattgtgttatttggattcgtcctcgcaagattcccatgtggtatcagtattattacttcccacattacagatgaggaaactggggcttggaaaccccaggtcaggggctgaaaggcacccaggtagtcagtggaagagctttggttctaagccaggtccttgtgcccgagccttatgctccaatgccttgggggagtggcgaggccacttctttcctttggcttttattgagttcctgctgtatacacaacaagctgctggggtttctcctcttgcagagcttaggtttgagttgaggtttgagattagtttgcaagaaccagctrgggcgtggcagcctgtgagtatcacatgaattaggcagaggtatgatgtgagcggagggtgctggtggaatgggggtggctgtgggcacaggtgtgtcctcgaccaaggcatggagggcatggtgggggccagcctagtgggctgcagtgtgccccagaccctctagggctccacgcatatatcaccttgaggcccacggaggaagcaggttaagaacggggttctggaatccacagaggactcgtctcaaaattacgctcccgtcttttaacaagctcattctctctaattaataaattacactagggcagagcgatagctcctgtagcattttaattttcaaaatccttgyttttcttgtcagttttaagtactcattatagacaagatgctatcacccaacataccaggacacatctgcataataaatgaagtctccgtggccacagcttgtgggattttggaaacatgttgagcatcgcaggtgcgatgccgatgaaagcctggatgtcggccgctgaccatggccttcggggcctccccagccagccctgcatgcagatacctggggcagaaacaggtagaaagagctgaggccacattggtccccacttgctaccctgaagaggaggctagcaaagggaacaagtgatgggatttctcacctgggatctgaccttgggattggaaagtttggtgtcgatgggttaacataatacctttccagcaacctgtcrgcaactccagctgcaccagaccgtgtggtccacggagccaggcagacttgcagctctcaggcccagctggccaggagctgagttttccttgattgtagtgggcttgttgggtagggcggcctagagaatgggcagctctacccacactccagaacacacaacccctactgctgttcctaaggttctgtaaacttgtcatataaaccatccatctcatgatggctgctagtgagcatgcagtaaaaagcggtccattcctcggatgtgaagatgcagaatgttaataaaaggtgcacttactgtactacttactggtagggtcagtagaagccttctgctgaccattattgtcacacgtccttctgaaccctggctgttttcctggaggcatgtcttttttgttgccgttgtttccaagtccacccaaacttaggaggaactgttctgttctttgccatttgaacattgaaatatttcatgtgctctggtgcccttttacagagttatttttttagaatcctagggtacatatattttacttctgtttcttcctgtgttttttggctggttgattattcatggaaccatttaatttgccaggatgtattgagcacaaccaggaaggcaaaggtgataagccatgtygtcttgggtagtgggatccgacggtaaatattttgagccgtggactcaaggcgggtggatgtgtcattctccctctctgatctctgtcctttcatctataaagagaaagctcggaatctgtaattgtagagatagtttccagctctsgtcctctgtttctgtgctctgctgggattgcaacttgaggaatttctggcagatccatttcttcagtccatgttcctcatctgtcctggcttatcagtccttccccgcctttggccctcgctgtctgtcaccagccacactggacttctgtccccagatgtgccacactggtcctcgtgagggcctctgcgctaggtccccctcttcctgcagcattgacatcttggcttatgtgctgtccagcttctcagagagatgtcttctgactaataaattggattgtccccgttgtcactgtgaccccttaagaaaccacaatgttttgttttctatatcatctgaaagctcatttgtttgttgactgtctcccaaagtggcacaaatatggattgagtacctgttgggcaccaggctctatttcatgtactaggaaatggcagtaaaacaaaaggtcacttacattccagggtctagtggatgaaaccaacaataaatagcaacaagatcaacaagattctctatcaatctatctctatctctgtctctgtctctgtctctgtctctrtctctatctctgtctctctgtcacacacacacataaacacaacatctggtagtgataagaattatcacgaaaataaatcaggtgagaggaaagagggtgattgggtgactaatgggctattttagacaagatatggtcactttggaggaggtgacattttggcagaaacttgaatgaagcgagtgagccccacatgcagatacctgggggatgaactttctcgccaaaggcagcacaatttcacattgrggtcgttagtccattggtaattyacrtgatggatattgcaaggcaggaattgattttagttttctgtattgacccgcagtttccttggtggaatggtctgccccttcccagcctctgtcgtttactgtggcctcttgtttccaggccctgttgatttccgctggtctgggcgtcttaggttgaaagcacacagtctttctcattgtcattttacagttactctcgctttctagtgttgcgggctttcctctgccttcttcaagaccatgctgctcttcttggccctttatcctggaatccgttttcacgttccaggaaaaatctcttctatgagattttgattagaatggctttgaatttatrgattaatttgagaacaactgatccctttatgctaggagtcttcttacttgtaaacgtggtccatttttccatatatttattagattagctttaatacctgttygtataattttgtaattgttttcataaaggtagcctttgtagcttcttataatgttattttgtcatgataattgaaagcaatcatcaatttttttgttttttgttttacagctaaggataaatctgagaaaatatttgcactagcatttgtcaagctgatgagatacgatggtaccmccctgcgagacggagagcacgatcttatcgtctataaggtatcyggttgcattggtgcaatattgctgctatagacagtttcagtcttttctgggctccctgacctggaccaacctttcccatcattgtgaggaagctgctatctagctacatttaattatgcaaatgaacatttccaatgaccagcccttttgttgttcctaacgggaaaagatgatatacaatataacaataggtgccatctaaaaatgccgtgaacatgaattatgctgcagtaataagggaaattattaaaatgtgtatttaatatgatacaaagcaattacgatggttacaaggattagggataacaaaggrtggcaaaaatggtgtgttgctgtttgtgaattgcctttgacatacggcatgactaaatccacaggccgaagcraagaagctggaagatgctgccacgtacttgagtctgccctccacgaaggcagagttggaagaaaagggccactcggccaccggcaagagcatgcagagccttgggagctgcaccattagcaaggactccttccagatctccacgctcgtgtgctccaccaaactgactcagaacggtgcgttykagaggagaaacacactcaccccaggagctctgccccagtcctgtcttttccatgctccttcctatgtggaggtgtgctccgtaggtgcatgaacgtcacccataaggcattcattgcatcgggctgtgatgatttatcaatgcatagaaggtggcatttgttcatttgttgtaatttaaaattcacacttctactctggtctaagggttattcttttatttttatttttattttttaagacaaggtctcagtctcgctctgttgcccaggctggagtgcagtggtgtgatctcaactcactccagccttgtcctcctaggctcaggcgatcctcccacctcagcttcccatgtagctgggaccacaggtgtgcagcatcacgcttggctaattttatttttattttttatagagatgaggtctcactttattgcccaggctattcccaaactcctgggttcaggcaaacctcccgcctcggtctcccagagtgctgggattacaggcacgagccactgtgcccagctgtattactcttaaagggagataaagcaatggatttacttcttaaaatgatttttggccaaaggaaggtagcgtgacataaaggaaagtgcacaagatttggagtcagactaaaaacctggaatcggaacatagccctgtgttaaccctggggatgcccttgaacaagtcttctgcacatttctgggtcttatcttccttgtctgtcgatacgggaatagtgcctgcctcaaagggcttagtgagggttacatgaacagtgggctgggagctcacctccctctttatgtcttccccattctcagctactctctgagataattactagttatctttatttttaaaagctggtttggatgttactttctagccctactcgtgttgtgggataagcaccccctgctgactcccacaccccaaagctcagccctaatgtggcagatcactcatccatcagctggtgccgtgcccttgtgtggggttcggccgatgctttgagtgcctgcaccaccactgcttgcagcctctccagtgacattgctgtccagccaggggtacttcttattcagagcacactgatgttgttgctgtcactccgtctggaagaggcagaaatcctacatttaaaaattgaatcttccaaatgcagccgtatcacagctgtgcagagtgactttatgctctcttgaagcagagcttgaaaatccaattttttcctcttaactgcccgatacagattttgattattactgtctgttgctatcatgagttgtgtctctgggggattgtccgtaaatcatggcagtagttttggatttgcccaagggacagtcatcgtttggactttaataggataaacacaggacaaaagtaaagccattgtctggaagtcaggacattgtagtggagcgtgcactgagtgtgctgcatgtttgggcatgcgagccctgggtcaaatgcttttggatctttccgtttctgcactttgcactctgttgttctgggctacactttcccactgctggtctgctgagtaaactgcttggtgtgggagcagtaagtctcttaagtgccttaagcctactggggcacttttatattccatttgcatgcatttctcgaaccatttatgaagggtcctakcttgtggttgtgtagtggtctccatgagcatatgaaaagccttacctgggtgtgggatctatgcagccgtgcagtggggaagggagagaatgcacagggagcctgctagtggcatgcccgaggcatgtgcagtgtatttgtccctgttcatgctgctgataaagacatacctgagactgggcaatttacaaaagagagaggtttaatgtacagttctgtgtgactggggatgcctcacaattgtggtggaaggcaaggaggagcaagtcacatcttacgtggatggccgcaggcagagagagagagaaagagagagagagagcttgtgcaggggaacttctctttttaaaaccatcagatctcatgagtcttatcactctcatgagaacagcacaggaaagacctgcccccatgattcaattacctcccaccaggtccctcccacaacacgtgggaattcaagataagatctgggtgtggacatagccaaaccatatcatgtggtcagcagtgcggggctcaacttgggacttggttatggaarggatgctcccctgtgacatgttagtctctggatgtggccttgatagctccactcgcctgacagatgacagcatccagagcctaatttaacccaaaggtgacatctccaggtgggccacactttagcatttcagtaggtgccatgtgttgcagtgctcatggtgcaggaagccatcatctcataattgggtcatgttccgaaagcatgctcrgaagtcattacttaacttgctcatctttccccattcaaagcaatgctctgagctgcggttaggtgatgaggcccatccacagaatccttcttaacccttatgaccctggagaaaggggactgtggaccaggacatccccccggggggtggggtcagtggcaatccctcctttcaccctcaagctccttaagtctcaccagctgcagagtaatcccctccccagactgagggagagggcaccctgctctcagcagcagctgttgccaggcaacaaggaaattccgatgtgatgccactcaccaggactgatgggaagtctgcctttcatttctcaccagccacggttccccttcttgggattgtggcatgtcaggtgtgtacaagatggagctgccccaaatggcgtctaagcatcractcccacattctcatttgagggaatcatttttctgaaaccatgatttgttcctgcgaagttccattacttagggaaacgcagtggctgaattattcattgaggttggtattaaacttctctgtcctcagcattatgctagatgctgtgggggatatgaaagaagtacmagatgtgattcctcttctcaattaactgactatataattagaaaggagtcatgaatatgggctgtgagtcccggtaataagggcctggggtgggactcatctgccttgggcagcctcatgggggctggacaagccctgttttcttccagcactccctttgctccaaggtgttttactactcattagcccaattggactttgtctcaaacttacaatacagcgtgccaccaactttgaatgaaggggatccagattattactgtctattaaggaaatactggtaattcttgtgagatggaaatctcccttaaccctaggaccaagagtgtgtctgggcaggatggagccttttccattacttcactttcacttagaaatgaagacatgttgcccaggtgcagtggctcacatctgtaatcccagcactttgggaggctgaggcgtgaggttcacatgagcccaggaggttaagaccagcctgggcaacatggcgagtccctgtctctactaaaaattagctgtgcatggtggcgtgcacctgtagccccagcaacttgggaggctgtggtgggaggattgcttgagcctgggagttagaggctgcattgagctgtggttgtgctcctgcaccccagcctgkatgacagagtgagaccctgtctcaaaaataaataaataaataaataaataaataawtaaataaataaaaaagagtagagtgctcaattcgtcatcctctcctgggatgactgctgccatttgtgctttggactaggcattctgctaagtgctttctacacgtcatgtcagttaattcttacaaccaccttgtgaatcaggcaacactgtacccatggttcagatgagaacactgaggtgaagttacctccccaggccaagtggttgctgcatgctggtggttaggcccacacttgggcgtcttccacgggatctttgggtgctccttttttgtctccctatttttaactcttccctttgtcagctgtacttgttttggagcttattgcctgcatgccttttgtacaatttgatgctgaagttataatggatgtctgtatttcctgattttctacctatagtcacaattagagtttgttttttttttcttcttcagtattaactagagttttgttttttgattctttcttttatggagacagtttctgtagctgaagttggttcatgagcataacggtaaattagatgtactttgttaatggtattttttcgagtaatgggatgttaatataacttcaggtgaaacttgggtaggcatatgtactttcctagagagcttttggatcctgacttcttaccttaaagaatatcttgggccaggcatggtggctcacacttgtaatcccagcactttgggaggctgaggcaggtggatcacctgcgatcaggagttcgagatcagcctggccaacatggtgaaatcctgtctccactaaaactacaaaaaaaattagctgggtgtggtggcgggcgcctgtaatcttagctacttcggaggctgaggcaggaaaatctcttgaacccaggaggcggaggttgcagtgagctgagattgcgccattgcactccagcctgggcagcaagagcgaaacgccatctcaaggaaaaaaaaaaaaaaaaagaaaaagaatatcttgatgccttaaacaaaaacatttctggacactgtcttcttccacattgactctttaaaaaccagtatattcattccttgctttttctatataaaatgcaacaaacaaaaacacaaccataacaaccacaaacttctgtggaagcccagacatggtgagggccggaagctcactcagtgcaggcgtgaacctcagtkcaggcgtggtctcagttgtccagagctactgtagctgtggggactcttaaccttgcagtctcagtactttaatttgtgttagttattttatttatattatctataaaaaaatagcagcttgttcttgagcaggagaaacaaaccatttggtatccagtgcctgggcagcgctttctgggtgagcaggcctcttcaggccttgtggtgctctgaaactgccttcctgtagaatggaaagacaagttcttttttagtttcccaaatgcacttttaaagcttctacatggaaatcatttcatggtaaatgtcgttgggaataatgaattcaagtgtactaggtgttaagtatgttgctacaaaggratggaatatttagcaggtgaatcttttaaaatagggttgatttctctgttcacaaaattttatagagaacctcacataatgcatgattaacagagacagaacagmgttkcttgcttgtgaagatctgattgtcattttctgtttccagtggaccttctggggctcttgaaatggcgctccaacaccagcctgctgcagcagaacttgaggcagctgatgaaagtcgatggtggtgaagtagtgaaggtaacatggagcccaaagggactttttgggtctttttttttttttttttttaatgtatgttaacagaagtaggcagtgacttcaaaggtagtataggattgtggttatactccctttaaaaaatagtgacatacggattgggtgcggtggcttacgcctgtaatctcagcactttgggaggctgaggtgggtggatcacctgaggtcaggagttcaagaccaccctgaccaacatggagaaaccccgtctctactaaaaatacaaaattagccgggtgtggtggcgcatgcctgtaatcccagctactcgggaggctgaggcaggagaattgcttgaacccaggaggcggaggttgcagtgagttgagatcgcaccattgcactccagcctgggcaacaagagcaaaactccgtctcaaaaaaacaaaacaaaaaaatagtgacatacacctctaggtgcacagagtgtttcttggcttctggtttggggggactctctgggttagccgtgaaggggactggctttgcaatcaacctcatcgtgggttctgcgtcctcttcccataggtcctcactacaggactcacaacagttcagtgacctctttaagcctctctttcccctgccatgagaagtggggtaacagtagtgccttctgcagggtcgttgtggagcctcaggtctttttactgttgtcatgatccttgttactgccatcagcattcgtactagactccctgagatcccctttaagtgaccaggagaggtctgtggtgtggtagaaagatcacgacactgagaggcttgcctgggccgtcttcttcccacgggacgctctgcagcagtgtcgggtataattattcattcagacccttgtggcctcagcatctttatctgtgagagagggcagtcagattacatggccggaggtccctgggagcactcagcttctggaattctttactctgtaattgtttgtggttctgatattttctgcagtattaggctcttctctgctctcagataccccacaatttgctggggcaacttttccttgtacgtgaggaagcgaatttccatttttagtcgattctgtttttggctatgggacgataagggggtcactggcatgtggcgttctataagcatagactctccagcaaggtctgtgtgttgccgcctcagttcctcactctctaggagaggtgattgcagaaagagacgaccttatctctgtaaaaactaattacttaaaatggccttaattaaccagcagtgtgcttcacttcagtatcaattaatttggtcgcaccagtttcctgaatcgtataactcttcagacatatactcactaatcttaaaattttaatcatcttctcagtcctggtgttctcccaatggcttggacaatgttaattgcattttaaacttccctgtgttctgtaaattccctaattcaggtggaaactaggtgaatacatgaacgtagttgagaagaatccagttaatgaaattttgtcctctttcattttgaagtccctgtatcatattaggaatgagttgtatttctggcgaccagttaccacagttacctggaagaatgtagaatgatcttgtcccgtcattctcccccattcccctcatctcatagattctcacatttgattattcatccctagacrtggcctttacacctttcctttcttcctgtgcgtgctggtaccacgcaagcctgggtgacctgtccagcccttacctaccttgcctaactttgtgctttttctctgctggcgtgtctgacatgygccgtgagcctagagagtggaactgacttgaggccacggggytgttaatggccagccaggacttgaggaattcctgcctgcacggggctccttttgctgatagggatgctgatagattgtgggtttggttccatttattcaggacctcccttctgagtattgatgactgatagcagagagatggcattgcttggtagattgaggaaggtatttgtgtatttagcaaaagatacgctgtcccattagatggaaaatggaaatggtgactttggtgcccttgaacatggtcttagagagagggtggggtgccagatgaagccctttcatggctccgtgtgaaggccctccttcaggtgctcgcccctgccccactgcagctccgcagcccaatacgtgcagctccatctccctgtggttctgtttctgtgccactgaccatgtcatgtgtctgggtgggaccaggtggtctacttcagggactttgcatgaaccgtgacaggccaggtcctgccacctgggagcctgttggcagggaaatattcggctgttagcagatggcatcaagttttgaccttcgcaaagaatctacattctgaaaatgatgggaaatggtgcaaaagtaacaaagtggtacagatccacatagttaggagttgattaatcccttgacatccagaccagcatgccttttggtcaggttggttttgtttcccactgtttgcatgtgacattttctggtataaagtaagtggtggctggcacagccaagcatggagaggattttactccttaaagggtctctgatctcatgctgggcatgctgggcgtcctctctcccaaaggaaacggatgaggctcatgctgggcatgctggacatcctctctcccgaaggaggygggcgaggctgttgctgctgctgtggttccacagcactcctttgcgagcaggagtttgtggtttgcttctttaatcttggggctatagcagtttgagatcttccatgccatcccaaaagccccctgggtgttgggaagaggctgcacagtccaggaggaatctgaaccaaacacctgacccagcctttcctctgatgtccttgctgtgtgatcacctcacccatttatttttatttttctttaaattacagtttcattgagatataattcacataccaaaaaattcatccttttactctgaagtttttagtgtcttcatggagttgtacaactattaccactgtctaatttcagaacactttcatcatcccaaaagaaaccacatagctattagtagtcactttctcctcttcctgtaaccactaatctgcttcctgtctcgatggatttacctgttctggatattttatgtaaattgaatcatacgccctgtggccttttgtgtctggcttctctcacttagccttgtgtcttcaaggtttattcatgccgtagtgactatcagtgcttcacacctttttttgttttgagatgaagttgtgctcttgttggccaggctggagtgcaaaggcgcaatctcaggatcttggctcaccacaacctccacctcccaggttcaactgattctcctgcctcagcctcccaagtagctgggattacaagcgtgtgccaccatgcccggctagttttgtayttttagtagagatgggggtttctccatgttggtcaggctggtctcgaactcccgacctcaggtgatccggcctcctcagcctcccaaagtgctgagattacagatgtgagccactgcacctggcctgcttttatgcctttttatggccgataacattccatcacatggatagaccgcagattgtctttccattcattagttgacacacatttgtattgattctgcttttttggagatgatgaataatatttgtgtacaagttattttgtgaacatatgtttcctttcttttggagagatggccaggaatgaaactgttgactcatatggtaaatctgtgtttaagtttttgaggaattgtcaaacagtttttcatagcaattgcacaattgtacatttctaccagcagtgtgcaaggtctccaatttctctgcgttcttgcccacttcttattagtcatcttaaattgtagcccagatagtgggtgtgaagtgatagctcatgatggtttccctttgtatgtccctaatgagtaatcatgatagatcagtacttcatcatgtttatggccagtatttcgttgtgtggcgttctgcctcttcttgaccttctcttctaatacgaatcatcacttccaacaccgtgatcttcagtccgtcttacatttcctgcaggggaggatggggtgggacttgaagctgacttgtagtgtgacatgcctttgaagtctcttcctaattacatgtatgatgctttgtccttctttgcagtagtatttatttggtaaattttagtcaactgtaactgtaatttcgacattgttgttgaataaagtaagcaccttctggtctcaaaactgggatactgctgtgtattccagtttcagaatcacgatcctcttccatgcctgggcaccctggttggtagaaggtccttccttccactcagctgggtcctgtccctgtgtggcttctgcccattcactagctgaagtcctgtacccagtgtgtagaatgagtgagatgcatcttcccagagttgccattcagcgctttgtcaccagccttatgaaaaccggaaagagggttggaaaggccccctgggggaagcagtaggccctstccttgctttgaccctctccatttaacactggtggcatttctttgttctgaattcrctcatccaaaatttttgtcttgtgtatctagtggctgaaaaggatcccgaatggctttataggtagtgctgggggcaaagtgggtatttggagtactgcagagatgatagttattccagtgtgtgggggragtccggtgggttcacattgtcacccgaccttctgtgtctatgcagtttcttcaggacacgttggatgccctcttcaacatcatgatggagaactcagagagtgagacttttgacacgttagtctttgatgctctggtaagagagctttccttctcatatgcttggataacacagcgttcttccatgctgcagcgtctgaggctggagtcgggggcttcgtcacagtgaccttgaacgcattttcagttgtaaatccaatcagagatgaattggggtggcagattttttttctcttttttttaaatgtaaaactgtagttaggcaaatgtcatttctagggtaagaaaaggtaaactagccaccaacttctatctgaaaatgttatggttcatatcctaacacaggggtgcagatggttctgatgaagattataaaatggcttacattatgttgctaatgaaaatattattgattaatttgacaggtatttatcattggactgattgctgatagaaaatttcagcattttaatcctgttttggaaacttacattaagaaacactttagtgcaacgttagcctacacgtaagttcctactttgttttaaaaccaatacttctttttttggtatttgtgttatttagagtctttttcatgtacttttgtctatgactgtgtatttactcctgctsaaaactctgagtttactggaataatttttagtatygtttccctcttaacatacctaaaaaccttgttgaaagagatatgtgataaatyatcgtaatattctggaataaattcttgttctccctcacaccttccatttatctttgaaatcttcactttatgttcgatgaaactgagctttggatgcggagtgtctgacaccgcggcttcctcgcgagcctttgatgaatggataaatgcatgtgttcccgtgttaaggagattggttgtttagtgtgaattagatgcagttttgtactttgcaatgtatctccttgctctttaaagagcaccttcccttttctttgacaagcttcagctgtcactgtcttgrattccttctatccacccctctgcccgtctgtgccccagaggtctaggaagacaccagaggctatgcatggtgcctgggccagcttagcagtgtgcctggtattgaagagcagagccctggagtctggagtcaggctgcctgggcttgatgtgcagctctgtccctcacaagctctgtgatcttgggcaagttgcttaacctctctgtacctcagccttcttgtctgtaatcagagcatgattgtaggcttgtgtggaaattttaataagttattacgtgtagagtgcttggactaatccctggcacttagaaagcactaagcaattattgggtttcattatcattagatttattatgatgacttaccggctctttcttggtggaatttattggcatttattcagactttttattgtgtgagttacagcaaaacataaagatttacataatttctttaagaacatcccgcttagaatcagtagaaaggattctttttagtgtgagtaaatttagttaaaactcccttctgtgtcttcaacatactttgcaaaatacctgtttttcctccctgtgtgcagtcatgaactcaggtcagaggactctggcctcctgaagccagctgttaatataccctggtcctgcacctggattctttcatatctgcctcgtgtgcgtgtttactgtaaggtggtgggtggagctccaggaaggctaagagctgtgaggtcctcaagcctgcggaacaagctgtgactagttctttgcacttgcttgctaataaacgtttgtttaaaacattttgttcgctgagtggagatgcccagtgtgtgggcatgtcgagtagttccttacagaccgtggggagggtgcattgcagggcacttttcctggctcttgtgaccaaaacaggagcttgtggggtttgcggaagtggcctgtggactgcagcaaacgtagcacggcctccacgtgtgctcattttcaaaattctgccttttgattgaaatgtggccaaagaactcttctcagattaggctccgtgcttgaatttcagaagatgagaggcatgaatcagcttaccacactgcagccacatctcttcattggcgccagcctttccatgctgtgctgttggggaaggagtgatgcagccattctcataggtggagaaagaaaaatgggagattttgatgagtttcctaatgagacaaacaaaaagtaccattttttctttatgctgtgatgggactgagataagaatagtatcctcatggccgggtggagtggctcacacctgtaatcccagcactttggaaggccgaggtgggtggatcccatgaggccaggagttggagaccagtctggccaacatggagaaacccccatctctactaaaaatgcaaaaattagctgcgcgtggtggcacgtgcctgtagtcccagctacttgggaggctgaggcaggagaatcacttgaacccgggaggcggaggttgcagtgagccgagatcgtgccattgcactccagcctgggctacagatcaagactccgtctcaataaaaaaaaaaaaaaaaaaaaaaaaaaaggatcctgtcattcaatctatggaatctgctgaaaaagaaatttttattgtggaaaataagtattgttagcatgttttggtaaactggcaacctcacgtggttcctcagcagcctgaatttgcatgtctgcaccttgaaattccaaaggagtcagtggcgactgagatagctctgaccacatcatggaaggtcgcctccgcattggtgatatgcttacagtattctctgggccaggcgaaattccagtaatattatcccagagtgtccttgtcctcttctcctctagaaggctttggtaggtacaggcttactttagactcttgtccatgtagcctctctcctttggtaaatgttgagatctttagcccttcttcccaacaacaccaagagaaggaatgaaagattttggcaatgggsagtcctcttccgcacctcgagctgtgtctgcggctcccctgcgtgggtagttcatggatgctggagccccactggactgaccagcactggtacaagtgagaatkaagggaggcatcggctttgggggctgctcttccataaaaccagcatgactgggctcctttttgtccaccctatggagctgctgcaggctcctcactggcaactgatgctccatctgctccgccccctctagccagtgccaaggggttgctttttgtgcaggtataagatggcctggcagatttatttttatttattttctttttgctgtctaattccaggttaagattcatttgctggttctaggtccttcttttatttattttctttctttttgctgtctaattccaggttaagatacatttgttggttctaagtccttctctttgcaaatcattattatttttctttttttaattggtttgaagaattcccaaaatgtgttctatggaatgtttattccctgggatattaatatatgtaataagaggtgcgtggtccagtaagtttgggaaaataagtaaaactgagtgaagcaggcttcatgccagggtgttgcatgctctcttgtgcagtgagcaccacccgcagaggcctatatggcaaggtgtgttttccagccaatggagatggacaccgtagcaggaggatctgcagamttcgcctcttcagaacagcgagcaggagtgtgactctgagagcatcagggctccctactagagctctggtgcctgatcggtgttagaaatggcttcacatccactcagtctcccaaaaagcttttcaggccatgcatggtggctcacacctgtaatccttgcactttgggaggctgaggtgggcggatcatttgaggtcaggagttcartaccagcctggccaacatggtgaaaccccatccctactaaaaaataaaacccaaaaagttagccttgtgtggtggcaggtgcctgtaatcccagctaatcagaaggctgaggtaggagaatcgcttgaacctgggaggcagaggttgcagtgagcagagatcacagcactgcactccagcctgggcagagcgacactacrtctcaaaaaaaaaaaaaaaaaaaaaaagattttcattgtgatgtattggtaaaataggtactcttagctcatccataattgcagtgaaggttgctcttctgagtgtcttattccataacctgagtgagcagtctggcctttactggctcacaactgaaccagacatgctgtcagtaccccagcagattgcttttatgaacataaaaatctttcatgtggcttttaaaaagcctcagtgaattttgttggatgcgtaagatgttggtgactggagaagtttgggtggcggatattcttcctggtgtcttactggctgcacgcatggtgctagtttttggagagttgcagtgcagctcagtacattaaaaaatgaccgtgtgttgttgttaattcagttgttcttttattatgtgtaagctattgcttgagggtcatccttatgaacaaggattattatttgatgagtcagtaatggttgaaagtgtagaagtgtggatagaattaaaaatggcagatcctcactactgcctctatcatttaaaaataacacatgctcaacggataaaaaatagtaaagaaatctcacattactcaaatgttatagygyagacgataaaagttcccttgtatrtaatgctacatattggagatatctactgtgccagcatttattttctatgtttatattaacattgttattaagattatgactaatatgtctgcrtattttacaaaacagcattgttatttttgcttgcttaaaatttaaaaacttaaaaattgttataatttgcatacaacaaaatgctcattttaattttgtttggacggtttttgtatrcccttggaactactgcccaaaacaagacataagacattgccattccccacaaacatccctcttggcctatctgagcccatcccactcccagacaagcagccactctgtggtttctgttaggaatgtgttttgcctgttcttaaactttacaccagtggggtcatgcactctttttgtatctggcttcttcccttccacataattctcttgagattcatgcatgttgctttgtgcatcattaaatatttgattttgctcctctctatttctgagcagtattttattgtatgaatatttcatgatttgtttagccattttcttgttgatggatacatgaagtgtttctagtttttggctattccgaataaggctgcgatgaatattcttgtccaagtctttggtgaagtttgtttttgtttcccttggataagcacctagcggtagaattgccgggctaaaggatacgtgtatagttttctttgtaagatattgcgagacagttctccaaaagggttgtaccatattgcattcccaccagcaatctgtgaatgttcttttgctctgtatcctcatcaacatttagtagtgtctgactttgtagctattgtactgggggcaaaattatatctcttggtgattttaatttgcagttactggataactgatgatactgagtacctgtttattttattttgatttgccatttgtgaaatgtctgttcaaatctctttttcattttatattttgttgtctgtttcttattgatgtttatggtatgtgtgtgtatgtgtttgtgtgtttatacacataaatatatgtatttttttttgtcagacatgatttttgaacattttcttcctgcctctgtttatcccttttcttaatggtgtctttcgatgagcagaaatcttttattttgttgaagcctaaatcatcatttaaaaaaacagatagggattttcattttgtggctaaacaatctttgcctagccaaaggtcttaacaatgcctgcactgtctaatgtcacagcactagcctcgtgtggctatttaaataaaattaaactaaacaattacttccgcagttgtgccaggtgtgtttcaagtgctgagccaggttggacagctcagaaacaggtttccatcactgtagaaagttctgttgggcatcactgtttcagaagctttatgctttatgcttttgacagaattcagcatctgtttatgataaaacctcttggcaaactaggaatagatgggaagttccttgatctgataaagctcatctacgaaaagtcatagctaaccttatacataatgctggaacatggaaagcttttcctgtaagttcaggaacaaacgtggctgtctcttcttactatatctgtttattattgcgctggaagtagtaaagcaagaagaaataaatgcgggtataacaattggaaagaaaaactgtattttcacgttgattttgtatataaaaagccctcctgaatctattttataatttattttaaaacaaacataaaaggaaacttcaattgtatatatacacataattgagagggaattaaaagtacagtagaattacagtatggtacagtacagtacactttagggtcttatcaaaaagtcataggccgggcatggtggctcatgcctataatcccaacactttgggagggaggcctaggtgggtggatcagttgagttcaggagtttgagaccagcctgaccaacatggtgaaaccccatctctactgaaaatacaaaaattcgccaagcgtggtggtgggcacctgtaatcccagctacttgggaggctgaggcagtagaatctcgtgaacttgggagggagaggttgcagtgagccacgatcacgctactgcacgccagcctgagygacagagtgagactctgtctcaaaaataaataaataaaataatgagggataaatttactggtagatgactgaaaattgcaaaatttgctaagagaaatataaaaagtaaataatttgataatatataccatgttcatgtattgaaaaataaaatattgcttgaatgtttatttcaaattatagtttgaacacagtctcaatgaaaattctgtatgcttttgtgaaaaaaaaatggactaatttgaatatttatactttcaaaaagtctaaaataccgaaataatattttagaagatcaaaatttcaagatttattattaaacatcagtaaccaagatagcatggtattggcataaggacagacaaaaagttcagaaggagagaatataaaatacagaacagattcacaatagaccttcgattttgtaactgctgttttcttttaacagcataatgacaaaactggcctctttttttttttttttttttttttactatagtgatgagggagtgcccacctagtgtattgaactgctgtgcagtatttcattgtagggatgtattaccatttattgaaccggctctcagaggttgggcatttgcattgtttatgtatttttactagtcagatcatgcggcagtaaacatcatttgattcatttgtaattgtttctgtaggacagttactagagttggaattcctggtgtcaaaggatttgaatatccttaattataatagatatttccaatataatagatatttccaatatccttaattataatagatatttccaaatataacagatatttccttaattataatagatatttcttaattataatagattttccaactattatatataatagatatttccaatagatattataatacatattgccactttaccctctaaaaaatttttatgccctgccgggtgcagtggctcacaccggtaatcccagcacttggggaggctgaggcgggtggatcacgaggtcaggagttcgagaccagcctggccaatatggtgaaaccctgtctctactaaaaatacaaaacttagctgggcgtggtggtgtgcatctgtagctgtgtgggaggctgaggcaggagaatcgctggaacctgggaggtggaggtttcagtgagctgagatcgtgccactgcactcccgcctgggcaacagagcaagactctgtctgaaaaaaaaaaaaaaaagttttatgcccatttatccaacagcagtgttatgataccccaaagtttgtctgtactaggcagaaattttatttaattttcatgtgtttattaatgaagttgattaatatatttctagattttaaaaaattaagcttctcacattccctaaaactttgagtagatctattatcatttgaactttcttgttatttgaattacagtaaagtaaaaataatttaatacatttcccttcatctttagcaaggaattaaaaaaacctatctatgaattaaacactgaaaatatttatgaagccatgaattaatattaagctcctaatatatagtttatttataccaactgtctataattacttctgtagtaggatgaaaaatttacaaataattttactcaatttttgtgtattccaaagtgtgtaaacttttttatcatggaaaagattttaaatgttttcatattaggatgttacttgattttagatcccaatttataaataaacagactaagagtatagtagtcattgtgtttttaaaactaaatgtttttggggaatcttattaggaaatgtcaatattttaaaatcttcatgtgtccactgatagtattcttactattcttatatattgtttatagtcttctctataaggatttttacaatattattaaaaatttaagactgcttcctatttgaaagcccatttgtaaattttaattttcggtgtaagaactctagttttagaaaatcaactaaaatgaataaaagtgtctgagatgctttccaataacaaatactgtttcatgcctttaaaaaaattgttgtaaaatacacataacataaaattcaccgaatcattttattttattttatgattttttgagacaaggtttcactcttgtcgtccatgctggagtgcagtagcgcgatcttggctcactgcaacctctgcttcctggactcaagtgattctcttgcctcagcctctcgagtagctaggactacagccatatgccatcctacccggctaatttttgtattttttctggaggcagggtttcattgtgttgtccaggctggtctcaaactcctgagttgaagtgattcacctgccttggcctcccaaagtgctgggattccaggtgtgagcaagagcacctggcccctacctaatagttttaaagtgcaatgttgagaaaatcgtcaccactatccatcagagagtatttttggtgtcatgcctttatgaaaaaaatttttgtgtctctgtttggctgtaatgaaaatctcttcgattttattgtttaaccttggggaagctagtgttttacctgtggaagtcctggtttcctcatccattaaataggataatactgcctcatagtgttgctgtgaaggctaagttagataatgcatttcacctgcttagaacaacgtctacacttagaaagggcttattaaatgctcagcctttgctctcagaggtattttatcaggcacatttactgattagaaaacgttttacaggccgtgcagtggcttacgcctatgatcctaacactttgggaggccaaggggggtggattgcctgagctcaggagtttgagaccagcccgggcaaatggtgagctgctgtctctactaaaatacaaaaaattagctgggcgaggcggcgtgtgcctataattccaactacttgggaggcggaggcaggagaatcacttgagcccggaaggcagaggttgcagtgagccgagattgcaccattgcactccatcctgggtgacagggtgaaactgtctcaaacaaaaaaaaaaaaaagagaaaacgttttacagatattcatatactgatagacggaaaccaaataaaagtaacctacttgtatatttccttagcagttaagatttgagatattttcctttcctgagcttatttgtgcgtgtttgcattgtgaataggaagttgacaaaagtgttgaagaactacgtggacggtgctgagaagccgggagtaaatgagcagctgtacaaagccatgaaagcgctagaatccatcttcaagttcatcgtgcgctccaggatcctgttcaatcagtgcgtacctatcccctccatgcccgggctctcagagkactggcaggagatccttcacttctttccttccccttctctcgtccccttattctttcctttcttcttccccctttttcccccttgctttctaggctgagagagcactgttgatyctggggtgagctgcccactctttccttacccgcctgggtccctgccggtgctgaggcgggagccctgttcctggtctgagatgtgtgcctgtgagtcgagccttggctcctgaaagcattggcgatgacgcaggtgcaatcctgggcgtctactgagggctcagaagcccttttcaggatatctttatatggcaaaaagtcccaaaagaaaaacaacaacaaaaataggccgggcgcagtggctcacgcctgtaatcccagctacttgggaggctgaggcaggagaagggcgtgaacccgggaggcggagcttgcagcgagcggagatcgcgccactgcactccagcctgggcgacagagcgagactccatctcaaaaacaaaataaataaataaaacaacaatgaaaaggcaaaaccaagtgaaattgcctcacttgggcagactctgggatttcctcctcctcttttcctcagtagagtgatgtttcatttcgggagaactcttcctacatagggtatttccgtgaggaaggatactcaggtgctttagcctagtgacagttttcacacgctgtgtggatgaacttatgaatgatttttgagctttaaagtaaatcgaagggttaaaggggaacaaaaaatgtatttattaccattgaactgtatacttaaaatggtaaagatggtgaattatatatatgtatattttgcctcaataaaatacataaattgggatatttatggcttattttatagagagccttaatattgtatagatacagatgcaggttaagagctgcgctaaaatgaggactttctaagttggcccacgcctcttcactgtatgattcaaaagatgtgaaaagtaagtgtgttgagggtggggtgtggaatttcactccctctgcttggttttttgggggatggctattttgtgggtgacctgccatgagtgatgtcaatggatgttggtggttctacgttgttattgttcttgttgtgagttccacacacagatgggattcatgaacctgtgtccctctgaattagcgaatacatttgcctttgaaaagcatggtgcccttgtaacctattarcgagaataaggaattgaaagtgtgggcccacatcagtgccttcccgtttcctcctcactgtgttttcgtttstctgaagcagtcgtgtccagaagaaggactcaggagaagggggaagaattcaaaatctaaccatgtgtctaccatgatagtaataaggacaaagcaacaagttattgactgtgtgttgacctatcagagtcataaacagggtggtaaccactagtgatgtgttactggtcagggactggagtgtgcttctgttcactctggcgtgtccatggtcaaaaccacagtcctcgtgctgccatttttgcatacaaatatggcatgtttgagggcatcatggttttgtccttgacttagatattacactcttttattttgcttattatggatatgcatgacctttggtgtggattgaagttttccctcaaggatctaagttgtgatttattttctctttgttagggtgaaacacagcatggtaagctaggttatgttttcttgtattttaattctatttcagtaaagttaattctatgaaaatgaacttcctggccccccctgccttgctgttatattttcctcactgattttaaatctctgattatgctaaacccaagtcagtactagggtgggaggatgaacttgaaagatgttacagatttttgtcatgttttatttgaaaaatgttaattttgtgcagtttgtgatcaatatgacattgactcaggcatttgatgatctgcatattctcacccgataacactggactttccctttcattcagaggtttgtacttaaaacgatcgtgcattgataatggtgtttctgctatagtagtaaatgctatagtcttttatacaataatgctgctttagaaaagattgagttacccaggttgaccagtagcaaattatttctctgcctcgttctttaatctctttcaatttcaaaatacaaatggcacaaaatcttagattcatggtccataattttttttttcgtttgatcagtctaatagtgcttaggaatatgattggctgcatgtaatagaaaaacaccatttatgtgacttaaccatatggggttcactttttttttttagtcacataatgtgcagcccggaggaagagttccgagttcatgcacctgcgtgaggactcagcgtcctgatgtccttggctcctttgatctctctgcyccaccatccttagtggggtctctttatctcctaatcctaagatggcttctgcccctcccagcatcagctctgcattccaggtggaggagaggggaaggcaaaggagaaacagctgtgccagctattcttctttgaaagagctttcctcatccctagaaagtgtcatgtgctttcatcttattggccagaaccatgtcacatgaccaccctacctgcaaggaagctggaaaggatttttagatgggctggttgatgctttctacaataccagagtgattttagtaaaggagttagggagaaatagataatggatgggcagttaacattctcttcctcataccttcaacccagatggtctgttccctgagagcttccctaactcattctgggttactaaatcctacttaactaggttttgcagagcctttcttctccattagtttgggagtcaatctctgagacttctgtcaccagtatctctttggctttaagtatctctttaggccctaagtgatccactggcatggtttagtcctaccaggctacatagaaatggactgaagtactcagctgctcctcgtgtttgggacaggaagtgtttagtgctaaagtcctctgaatgcctgcattctggtgctcaacagcatggcacagaacatgatcgctctacctgcctttgtcctggtatggacccagcaggagccaggcatggtccacaaactgagtttctttgctggwataacttgtttgttagaagagttgagactgttgaggacacaaagtggtcacaagacaagttgtagcaattgttacaacttagtgaggctccctaagcctctgaggccattgtctgggcattcctgactttagctaaccgagtactgcagtgattctggagatcctgatgctgctgctgctgctcctgatcatgatgatgatgatgatgatttgagacaggacctccctctgtcactcaggatggagtactgtgatgcagtcataggtcactgcagcctcaaacccctgggctcaagccatcctcctgccttagtctcccaagtaactaggactacaggcaggtgccagcatgcctggctaattttttgtaggacatggtctcgctatgttgcccaggctggtctcaaactcctggcctgaagccatcctcctgctgtggcctcccaaagtgccaggattccaggcatgagcccctgtaccccactgattctggggatgttgatactcrtgttccttctctccctccctcttttcctcccttcttccctagcttcttccttctctcctcgcttcgttctttcctctctccttccctccttttttctctcttttgtcccttccttccttccttccatgaatacttaatgagtgtatgagccccaagtgtatcccagactttcacagtttgactttattattttttctctgaacgtttcctgaatgtggatcctggctgcctaccctcattcctgaggggagagaaggacataacgttctttgagatgtagagcacctagccgcattgtgcagagacaacaaatacttcaatttaaatctgtgttctaaaatggctgagaagatatttcatagattttatgagaggaaaaaacccatgcccttagaatattggacggtagggcagaagtcttctagtaatccctccccttctgtcctccccatcccacccctgctccccatcatcccaccacagcatgtcagttgttacttcatctgtgctatcacaggtctgaaatgtagctgaaatcgttttcctagcttgtataggctacttaaaggaaaaagagccccacgtcccacacagatatctaggatgtttgatccgtgacaagctccaaatgagtctcctgtgtggtgctgtcagaggtggggaagaaaacaaactaggactctcatcttcttacctgcagcatgtttattaccttgagagaaaaacaattgtgctcacagctggaattcatgagtgtgttttcctttttgcagctgggataaacttttgagatcttatttttctttggctttcaaaatggtctattgtgttttcctatagtgcaatagctttgttaaattccagtataattgacagtaattattcttccaaagaacaaagaggtgaaactttgaagatgaagatattgaagcttatgttgttaacttactatctttcttgctatgcagtctcatattttttgttttgtttagaaagctcattttgttttgaaatgagaacaacagtttaaaagctatggcccaaagacatttggttcctggggaacccactgaaagattcctgacagccgggggcacttctctactggtttttgtttgtctgtgttttctgtgtgggtggatcacattaactagaaagccagaaaacagatattctgcatcagaatcaaattactaaatctagttattgcctgccttctcttctgggtttcttgtgctttgtagagtttttgcctgtcatctggtgttagctttgtaaataattagttattgatcatgaataagttgtacagacctttttgctatcattccctgggtcacaaaatagaatgtagttaatagacaaagatcctgtcattccttgttaatgaacacttatttaagtagagcaaggaatgagcaggtcttattcatctgtttatttatcgataagtttctgagttgttttttctcagttttttatccacttcagggtggatcaaaaaagtggttctccctggtttatctgggaaaatgaaaagggaagattctagagactttaacagtgatcttttgttacagaaagatgcttcaaaaggatcacggcaaaatgctatgttctaaacatgttggttggcacaagagaaactgttttacatttttactcatgagaggttctggtagaatttaaaaaatattaaagattcattaatcatgccttatagattttgaagctgtgttattgggggcatacagatttataatcatgatrtctttcctgttggtctattccttaatcaatatgaaaagtttctcttaatcttttggctagtatttgcatggaatacctatttccatcctttyattttcatgctttctgtgtctttatacttaaggtgtgcctcttataatacaacatatagttgtatttttctttcatccagtctgacaagcttcttaattgagcatttcatccatttatatatagtgtaattaagtaatgttagatttatatattatttttgcattaattttcccttcyccatctgtattattttccccttttcctccttttttgccttcttttataccagttacactttttttaagcatctcattttctgatttttaaacatattatttgaatattcttttactattatttttaacaattattctagagatggtaacatccatgttggacttattttagrgtatttcaaatgattactcttaccaatccactgataatgctagatatggccagaaaaatagcacgctggaattgccattttcttctcctctgttttatattattattgtatttcaattctatgttttatattccataagacattactgttattttatacagttagtattcatttgatgtgttttatgtttgtaattgtttttcatccttcaatttcacttttcctttgggatcattttctttctgtccaaagaactcacttgtattatttcttttagtgttggccagttatgggactctgtttgtatgaaaatgatttatttcatctttgtgtttgaaakatattttcactcactatagcattctaggttggaagttattttcttcttccatgtattctattctattttgatttccttcatttatagtaagtcattagctttcagacttactgttacatctttgaatttaartggtattattttctttcttgctgcttttagtttgtctccttttctgtggttattgacaatcttactatgggttgcataggattgtttttgctttttatttatcctgcattgaatttctgaattttttgattgatatctttgatcagttttggaagatttgtggccattgtctgttctaatgttacttttgtctcattatcttcctccttttctcctggcacttcaattacatgtatgttagatctcctcaatatgcctgcacattcctagccctcttctgtattctcttcctcagtacttctgtttagttattttctgtggattgtcttccattttactaattmtgcctcttgctgtgtctactctctattttgttaatccatctaataaatttttaattttagagagtatattttgtagttttagaatttccagttgattttttcatagattcatttctctactgaaatttttctcttaccttctatttgtcatttttttatcttattttccctgttctcaaatatgattatagttgttttgatgttctaggaaattgtaatatctagattatctgtggggctgtttctgctctctttttcctctttcacttggactgtggtctggttttctgctgagtttaataatttttgtttgaagtcaagactgtttgtatgtaaaactgtagaagcttcagatgatgtgatctycttccagagataattcatcctgccttcttctagacaaagtggggctgaccatcttattttaatcagagactgtgctcagtttcgaggctacactggacctttagtatgcctcagtctccatttactgtgcctctggctttctaggattttcatctgagagtcggctctgttacctggggactctctccctggcgttttccaaactgcgagtcattttctctgatgattggtgcaaattccactttgctttatagaggttttcgttttggtttttagtcttctatcccatacaggtctaggaattacagatgtcctgaggggaaaaatgattgcagcttgatggctcccgaagggttgcaccagtctaccaggtgttcttcatgccacttgcaagcagaagttcatgattccatcattttaattgtttggtacatcatttaagcaaaccccatttgaaaacccttatttacaaaacagatccactaggttgcaatttcccattttacacagaatttgttgctttacagtggaattcatttaaatatcagactacctctagggtaattaattatcacttagtttacaaaattttccattgtacacaagttttcaggtatcgtatatttttaattaggcagcaaactagtattagtaaacactgtattamtaaaacatctgagtcacaatattttaaaatgcaaatgtgttgctttttagtaacacagcaacttgaagtaactgctaataaataatttacaaacgagacttattttcaattagtaacatatattagcatacatgtaaccaatgcacaacttccttattacctatttattgaatatgtcccacctcttgaatacttttcagttaccactgatgttgaaatgaatgcgtttgtaaagcaccattactctggaataaaaaagcaactcttgtgatatcattttaaaggattagaagatcatggtaaatttaggcaatggagtgtgttgttgattttcaatttgtgacataatgggtttaaaaacattggtagtggccgcctggckgctcacgcctgtaatcccagcactttgggaggccgaggcaagtggatcaccttaggtcaggagttcaagaccagcctggccaacatggtgtaacttcttccctactaaaatataaaaattagctgggcatggtggtggccacctgtaatcccacctacttgggaggttgaggcaggataattgcttgaacccaggaagcggtggttgcagtgagccgagatcatgccattgcactccagcctgggtgacaagagcaagactccattacaaaaataaataaataaaayaaaaataaaaacactggtagaaaacacaactgcatcttaatagtgtaatttttgtggggtagaaataaagctgaatttccccatcctctttccctccttctcttcctcggccctttccaccctccctttctgtatattttctgtgtttttcagatttataagatgtagtatgttacaatgaaaaatgcagtgagtggtagcattaagggtcagcctctgtatgtggaggcaygctgccttggctgagtggtctgcatgagtctcactgccaagttaccttccttgcttcatagatgttgaggatgtggtctctcattctaacttgtcacccaagtgattcccttcatggctatagacatggattcaaaaaatgttgaggtgtttctgccaggcccccacagtttgtgtgtttctttgcagactgtatgaaaacaagggagaggctgacttcgtggaatctttgctgcagctcttcaggtccatcaatgacatgatgagcagcatgtcagaccagaccgtccgggtgaaggtgagtgcyggccactgccaaggcagacttctccttctttttttctttcattatctcttttggaggtaggtattttgattacagttaattaacttgccccaaataccatagttgttaatgtcagagatctcaatttgatttcaagagctgtgctttttttttttttttttttttttttgagacagaatcctgctctgttgcccatgctggagtgcagtggtgtgatctcagctcactgcaacctctgcctcccrgcttgaagcaattctcctgtctcagcctcccgaattgctgggactacaggcgcatgccaccatgcctggcaaatttttttgtatttttagtagagatggggtttcaccatattggtcaggctggtctccaattcctgacctcaggtgacccacccacctcagcctcccaaagtgctgggattataggcgtgagccactgtgcccggcctttttttaattttaattttatttttagatgacacataaaaactgtacatatttatgggacatacgctgatatttcagtacaggtatacgatgtgatcaaatcagggtaattagcatagcatcaccttgaacatttttcatttctttttgctgtgaacattcagaatcctttctacttgctttttgaacatatacactaaattattgttgaccgtcttcactctgcattgctacagaacactggactttattcttcttatctagctgtagctttgtatcaaagtggacttgtagatgaagggcttcctgtggctgagctaaggggctgtgggccctgccaagcctgaactcgagggaaaggccccggagcctcttttgtagtgaacataatcatgctccatgtgtagtgaaatcccttcttcctcctccctaggtgctcttaaatattttcattgcttctctctttgctgtttggcaagacagattctgaattcactttatttaaatttgggggaattgatgagaatcatgttttacacctaatttctcagggtgtccatgccctggaaagggtggtgaaccttcatgcttcagtggatctttgcctgtgcagaagagcgagccttccagtgcccctgtccttctgtccttcttccctcttttgatgacctggtctcaccctgttgtcctttggaagaaagatcccttccactcacatgaggcctgagtgttctttaggatgctcactggtgtggaagtgcctgggaggcccatggagcagccgcaggacccccacamtcttggttatcctagttatggcgrttttcactgggctgacttattgcagaaggagctgtacaacttgcaatttgctgcctgcactaattccttcaaagaacaagaatcttccaaatgattagcttacatctttcactcgactgatcatggtagacgcctctgttcttcctcttttaatgtttgtttaacgtataattttagaaggcattcttatggctagtgtcttaaaaatattttggtcaagtcgcttcccagccttaaagctttgccatatgccctggaacaaagatgtatgtgtgctgagacgtggctgatggttgctgtgaccaaggaaaccagcataagtagacatgaatcaagtcggagcctacctttcatctcagaggtggtgcagctgtttggtggagccatttggactcttcactacgatttcttgattttttttttacatgatttactataaaaattggtgatttatacagaaagaaatgtaggtggtgcatacattaaaattttaggttatttgggcaacttgatattgcccaaagctgtcttattgtcccaaggttaaaattagcaatgtgtttggtacatttactactgaattcagtggcattttagaaaaacagacgtgtgtagtgtaagaatagataaaaattacaggaagttttgagcccagcagtaattttagattgctaaatatatccttacattattaaatttgattgggcttgatttgtgtctgcctccctcccttgaagtcagattacttagtgactagggaccgggaagaccgtgcttcagtgggtgttttattataagacacaagtgaattgagtgacgtgtgtgcattgatgcaaaccttacatctgcaagacagacgcacggcgttttattaggcatgtcacctcccttctggtaattggtatcgtattatttcacaataggtgctttctcgatgacgttggaaatttaaagattcccatcgtgggagcctgacttttgtgttgttttaactctttcagttttgctgtgtctaaatggaaggaaataccttgtgaaccatcttccayagacaaagtatattttcagactgtgacatttaaaggttaaacattgtttccccaagtgtggccctcgttggtaccaaacggttggtaccttcccggttcaagtgattctcctgcctcatcctcccagtagttgggattacaggcacccgccagcatgcctggctaatttttttgaatttttagcagagaaaggctccatccccttcttggtaccaaacctgccactggcatcaactttgcggattagagtcagccacggggttttacgcctcattgaagagggagggcaggaggaacttcagaagtmatttattgcaggataagcatggtctccagctagaattttcaacaggactgttttcattgatttagtgacaaaatttttccaaggtcatttaagtgagaaaacacaaatggaggacgcgtgggccagtttttatgttaagtcaaatgtccaggaaactccactgagtgtgtggatgctgcctgccttcactccccttcccagcggccgtctcccgtcacccccgctccccaggcgcccgccgtgcccagatgtttcagtaccgcctcaccgtccctcagtgaatggccctcagccctggggctgcagccaaatactttttgaaaacatactgccgtggccaaataacatgaaattccccatttctaagtgtcccgttcagtggcattaagtacagtcacactgttgtgcaaccatcatcaccatccctctttagaacttttacgtctttccaaactgaatggaactccagccccatcaaacaccaactccctgcagcccctggcagccaccggtccactttctgggtctaagaatttaatggctctgggaacctcatggaagtggactcataccrcatttgtccttttgtgtctggctttttttcttttttttgagacggagactcgctcagtctcccatgctggagggcagtggcacagtctcggctcacagcaacctctgccttcccggttcaagtgattctcctgcctcatcctcccagcagctgggattacaggcacctgccaccatgcccggctaatttttttgaatttttagtagagacggggtttcaccatgttagccaggctggtctcgaacacctgacctcaaataattcacccgcctcggcctcccaaagtgctgggattacaggcatgagccactgtgcccggccgtgtttggcttcttttatatggcataatgtctgcaaggttctaccaggtggtggcatgtgtcagaatcttcttcctttttaaggttgtcatgttgctgtgtgtctcgtgcacattttgcctccgcacctgtccctggatagaggctcggcctgttcccacctcatggtggttgtggttcatgctgctgggaactggggtgtacagrtgcctcttgaagaccctgctgccagtgctccagaagtggaattgctgtttctcgtggtaattatgcttgaattttttgaagaatcatcctgtttttcccagcaccccaccatgctaccgaaacctcacttgaaattccatattgactttccctcagcagccctttccgcagctcctccagctccaggcrtatcctctgccgcacatcacctaccttgagtgaatgatgcggctccgactgctgcattgaaaaggcctggggtcagaggcggaggttgcagtgagccgagatcgcgccattgcactccagcctgggcaacaagagcaaaactccatctcgaaaaaaaatgatraaagaaaagacctggggtctctcggtatcacctcttcctgtctgttttcctctgaagaggagaagcccacctgctgtgcagtgctgaccgtccccctccctgagacccgctccacccctagctgtttcctcaccatctcagatcttctgtcttcaccttgagctgccccttcacccggcccagatgttctggaaattcaacccgtgccttctggattcttctttgccctcggcgtttctctctcctacctgacaagagggtccttggccccattgcctctgccctckagtcgtgttctgtgttctgccccaagagattgtggctgctgttcctcccaggtgcccccgcygcccccagctgcggtgtctccagtcagcctcggaattcccttctgctgtcttctcttctctgtgctactgtgactgtggtttcatgaaccactgggcttgctaggtccccagttcttcktcttgaaattagggcagaaaagtcttggaaccgtttcctgcatgctgatgctggacctgccccttttttcctcggcatctcttttggtgttttcctgaaactcccatctggtgatgacttgctgtttctcagaaaactgtgctgttcttcagctgccaggagaaatgggtcagattccagtgtgtgacatccagacagcttcataggcagcccacctggctctccaagcctttttccctcgtggagacccaagtagaaccagtgcgttccccaggaaacaccaaacatctgggtgtgaggagcctcctgagggttagctcccccaatcagtggttgatagaaatagcatgagcgcctagtgccagagtaactggagctgatacttattgatcgcctgctgttcaacgtgctttgtatttctcaactgatttagtctttacaatagccctattaagtagatactttgattgctttctgatgaagacactgaggcctagagaccttaattaacctacccaaggccacaagagctgggatggggtaacgcgctggtttaaaccctggttggctagttccagaaccactctctttcccatttggctcctagagacagtgttgctaagtcctggctatcccgtggtgtttggaaacagggcccatgcctgccatccacatcaatggagaacaggctggatgctttgggctggaaagatgccgacattatccctggtggagctttccatcgaagtggacatgcataaagcaacttaaaaactctggtgaaatgccacaagaattgggtgagtgtgaaggggagggaggagagttagaaggggctggtcacgaaggcttgtgggargagaccttggcgatggccccactgtgttggcagcaggtggctgtatcttggccactcgtggattgcagtgctggattgaggcgtttggggctttgcagtcagttcttacaggcattgacatcatttcaagtccacaaatrttactaccttcccttaggatgaccctgggaaaagactactgcatgcaggaccttggcatagtctgttccatctggggctgagaatgccagaattttctatagaaggaaactttgaccatgatccacagtaggaaattgatgcttacttggtatatgtgtgtgagtgtgtctgtgtgcattgtatgtgtgtgtgtgtatgtgtgcgtgtgtgttgtgcatatgaagctggaaaatgctcatgaagaagttctacactgattccctgtgatgcattctggcattttctagtctagtctcctttagtctattctagactaatgtatttcagttaaaaaaaaattgctggttgacaggcactaaatttatttcatgagcactaatggatctcaacctgcactggaaaaacactcctctttattcatctcaggactctgcccctctgtctcctgcttagtttattatgaaaatattgtcagctttctgcatttcttccattgtcgtgtagagccccaggcccctgacgctcaggcaactttcctgaccagcatgcggattgaactggggtgaagattaattgaatttgaggccccccaagctgaggttggcacacagatgcagarggtttgtcttccttctggggcactgtccccagggagcaggcttccccatctctttccattctaaccatcacatggcgccatttccatctggctttcttagagaggagctgtgttgaaataagctattctgtaatctcagtaaatacagctgatgggtgagttctgccctccaagaggcacattttttgattcccttaaaaataatttcctgatttgaaatgaactgtattttcttgccttaaatcttacccagaattcttccttatgaggagtttttgctgctttttgtgtatttatttccgggctagcatctgggatccacacggctactcacagatttgtacacatagaactttactgtcctcagaacaaatgatctgaatgtgttagggatgatgataatttaagatcagatggaataggatttgctggcaggtgaggaagtcacgtttcactgagtaactttgggcctgtctggcacctctcctacagcagctcctgccttcgccccttcgtctttatatgtgtgttccagattttcataaaggtatcaagtcctggtagttgcattaaacaaagcakccatttattgtgtccttgccctcagtttaaaagtaatatgtgatctggttagaaaaatgccaaaaagttaattaagaaaaataagaatcatttatcaccctaccttccagagattacactgttagcatttttgtttttacagtgatgagctctttttgcttatttagcattatcctatatatatacacacacatatgtatacacccacacctatatatacacacatataaatgtaacatatgtatagtataaattctcatgtgtatacacacacacacacacttttacagtgttgcatttttctgtatatatctacctgtgtccttcagtatttttcaagcacacattttgaaaggttacacattgcctcatggctgtatgataacttacttaaccagttttccatttgagggcacatagctggtttctagttktcagttttcatgaacagtgcttggctgacctctctgtctatggcaaaggccttgctccatctggtttgctctgaggcatccagattttcaaatgctctaaagtccgatgaaagtcatgatcaaggcgattagggcttgattcctgggtgatgactctgtgcttctttcattggcgccgtgtgtctgccctgccttggtttccactagagctcccgtctgtttcttttccacttccttctatgcttcttgtcattgggctatgcagctgccatggtggatgagtcgggagccacttccctctctcagaagccacctgcttctgtgacctttgtgtttcttggtacaggattgttggccaagttaggtaaggagacgagaactccggtgcgttccactccctctgacctgacgaatcagggyctggagcaaaccaaccaatgagatgttggcaccgtcatagaccagcaagcagcttaaagaaatttgggagtattttgagtcagaagggtttcccaagagcaagtaataaaatattttcaccttcttgattttgagtggaggagggggtgcactgatggtgttaattgatctgaggatgtcatgggcatgagtcaggagtctatttgagagtctctcatcattcgtggggacacagatgcggtggtttggatgaggaccgtctaggtcacattgtctgtatggagacagacttgttgaattagaatattgggcagctgaggctggcaactcaggtgaagccaaccatgacaggaaggactacacttgttgagaatcagcaacaggccaggccttctggagagttctcctgcaacaaagagaagagagggaggtsccagagtcgaggaggtgagtaggccaagtttggaagttgctctaacaaaatactacaaacttggtagcttaaaacagtggtttttttcttctctcagagccttggagattagaaacttgaaatcagggtggcggcagggcaggttccttttggctgctccaagagatgatgtgttctgtgcctttctctaggtttctggtgatccttggtatttcctgacttgcagatgccttgctccagtctctgccccygtcttcacgcagcactctccctgtgtgtctstctttgtgtctcttctcttcttatgaggttgttaaattcagggccaactctactgtggcgtggcctcaggtcaacttgattatatctgaaaaaagactgtttccaaaacattcacaggtcccaagggttggaacttgaatttagccctttttttttttttttttttttgagatggagtctcgccctgtcacccaggctggagagcagtggtgtgatctcggctcactgcaacctccacctcccgggttcaaacgattctcctgcctcagcctcccgagtagctgggattataggcacccactaccacgccaagctaatttttgtatttttagtagagacagggtttcaccacatttgccaggccggtctcgaactcctgaccttgtgatctgcccgcctcggcctcccaaagtgctgggattataggtgtgacccactgcacctggcctgaacgtaaccttttgaaggacacagtttcacccacggtagacgtcatcgtggacgtcagtgtagagttcactggcaggtcagtggtgaacaaaggactggagaggaagtgggtccttagccaggcacccacagtcagtttgacatgggagctgcaggactggaaacttcwtagaatctagtgtgcacatgagtcacctgraggtcttgttaaaatgtgattccgactctgtagggagggggcctcaagatgtttcattataatcaactcccagctgatgctaaggttgtgggtccctggccatatattgagtcagaagtggccacgcctcgccttgcacagacagctgctgtgtgagcagtagtgtttgtgggtagggcacctggtctcagttcttgcagccttcaaggctggcttcattcaggctgcctgccctcagctgtctgacgttctggactattttgatttgataagtttgccctacacacagatgatgacacacttgcaagtgtgtcatgttaagaaagactcagcagaagaaggaacgagggaagtgaagaaaatattttatggcttgctcttagaggacctgtgggtccaaatgctccccatttcactatactgcttgctggtctgtggccctgcagagggttgggtagtctggctgagatctgaactcaccaggtgctgcagcattccagtcttcttggttgcttcctaggattcttcctgcccgctctggagggaacaataccactcacataggcaagaattaatcaggagaggtctggataaatacacttgtttccttgagcacctctccacccacatttatactgtgcacagtactttgcaacagtagcagaaatgcagcagtagcactaccttgcagaaatgcaacagtagctgaaatgaaaatcatctctcttccaccgtttcttcagcaaaccaagtatttctattggttttcttccaattctagtgcatgcccatcaaaatgtttatgcttgcaacctgcgtagtttttggtttactgatttttttatcattttatcacaacacctttccattattaatgtgtagttgtaattgtaatggctgtatgccagttcagaacatgtgcctgaattgatgtgcaatcatttgcttaatcaaatgatttttcctcaaattaatttttctattgttgaatactaccgtgttgcttttagcattttaagcctgcaacaaattatttcattgataagtagtgtgtgtttatgttttctttaattttatgatccatttttccatgttgattccttcacattgccacttgttagaggacaatgctttaatttgagattgcagaattctaggcacttgcttgccatccctcctgccttgtccccagtaatgatgctcactggtggaaaatctctcctttggccatggtggcttcagtgctcaggaacctgaacttattttcttctcccacccctgatcttgttcagagatctctcttgttaggtgctcctcccacatctgtgccctcggtcttggattctgcctgctgccaacatgcaaggtgccagtgagcccctttctccttcctccatcatggtcaggatttattcagcatttctctgaaagtgagcaggtctcagagttatgcttagtacctcattgttgagttatgtattcacctgtttaaaaaattccttcaatcatatgttcattctcctgtgtgccaggcactgtgctaggcactgaggagttacagcaccaatcacacagatacgctctgtattctcatggtggttccattggagtgagcaaggcaggcgtgaactcagtaaccatcccctatgtgtatagttgcatagttgcaatatgtgattttaagcaaatcacagacataaaattatcattgtggattgtagtcactcattttaagaaaaagtaaaggtcagggtgacaaggtatatcggggcattggaagtagtttaggggttcaaagaaggtgctgatacaaaggtagtcaccatgaggtgcttggatatgtaatacagcagaggaaaatgccaaacccagactctcgtatggtttggagagaactgtgctgccacttttgtccagaggggttgtggagcatgaagtaatcctaatcccttctgttcgtgcagtactctcaggcaccaaagactttgatgcgtgttatctcttaggatcctcccagcactgccatggtggttgttaaaaataatgagaaagctttctaaagggacgggcagagaacatcatcatgcaaagtctgtgcgtcttaatagctgactcattgatggaaacatttatatcccacatccactggctctwgtctggcttcttcaaatgcacctgtccctaggaccccttcctagagataccagcatttagaacagaccagtctaaacaaggtcttctcaagtgaactgaagatactaggcctgcaaacgctcatctgcacytcacttacgatgtggcatttataaatgcattcaccgtaggtgtttgtagattctttttatgttttaagttttaagtttgcagcattgaggcctattttgattgcaaattgcataaacctcaaataagatctaaatcaaaggaaaggtattgcatgcttataggtgactcaacattaagaattcagttcttcccaacttgatctacagattcactgcagtcccaatcaaaatcccagcaagtttttttgtggctattgaccaactgattccgaagttcatgtggaaaggcaaaagacccagaataatcaacacaatatttatggagaacaaagtcagaggactggcactactygacttcaagtctgctggaaagctccagtagtctaattacagaaacccaactccaattcacattagaaagaaggaaattaattgattcatgtagtttgggagtccaagtgttaagcatgagtgagtttaggatttagaaggtatcctcctcttggcttagtatttatttctctccatttgagggaaaagtggctgccagtagccagaggcttgcaattttcttttttgtctaatagtcttcgaggacacagagtgaccgtctccctctttaaggcaatgttaatcttcagacagaaccatcgttaaccttcttttaagcaggaggctatccctgaaaggaaaagactgtgaagttgaaacagaagtagagcttcataatgcagaaaatggagaaagagggatgagaggactcacaggaaggctgaagggacatttgtaaatgcagctgaagccagtgcaaattggcgactttgtgaaatgggttttgcagctattctttggagctgtctgctgaggtgatggaaagggtagttaaaagcttcatttaggattggtgttctgccagcatgccaagtagcccaaaccaaggcctgggaggagagcagactttaaatatgtcccaggaaacgttttattgagaaacatgtcaactaccactatagcattatcaagagggaaaaaggaatatttcatatgtgagcttaaaaaatcattagctctgttatattgaatacttgcaaaatttcattaaaattgtttttgcagaattttatgatagaataaattacttttgtgtatgtattgatgaaatcatggagttatatgagtttggatttctcaagcacccaaatagtcaacatcaagaatcagggaattaggaggttagaaagtcacatctttagtttttttcaggaacttgcccaggaacagaggggtcctaggtgggatgaccagaccccagttctctgttcttcagcccagtgcttttttcatgacatcactcaagtcagattttaaatttgtgcattacactggctttatttagaatcctgtgccaggcaatatagttttgattagaagctgaacagtattattctccatgaactgtgaatgtgacacttttataattcaagtagaattatttttcccttgggaaatcctatacattcaatatggtacattgaattagcaaagaggtagaagaaaaaaggggctataaaaagtgtatcttattaaaacaaagtaggttttcttcttgcctgtgtcacctttagatagtaattcttagcatcactattttttaaatcacaaattgtcttctatctagtgaaatgattaagaaagaacagtagtcctcatttgattaggtgaaacgtgacacaagtctcgttgatttttgaaaaggacattttcatataattccaagaaatacacattctgacattaaacattttatatgatccctattgaagattaaaaggagaggtgtttggccgggtgcggtggctcacacctgtagtcccagcactctgggatgctgaggcaggtggatcacctgaggttgggagttcgagactagcctgaccaactgaccaacatgaagaaatcctgtctctactaaaaatacggaattagctgggcttggtggtgcatgcctgtagtcccagctacttgggaggctgaggcaggagaatcgcctgaacacaggaggtggaggttgtggtgagctgagattgcaccattgcactccagcctgggcaacaagagcgaaactctgtctcaaaaaaaaaaaaaaaaaaaaaaaaaaaaaaggagagttgttatgtctgggaaattaggtggccatcaagttttttcatggtttttctttcattgattgattgattgatttgattgacgtactgagaccgagtctcactgtcacttaggctgtagtgcagtggtgcaatcttggctcactgtagccttgacctcctgggctcaagtgacccttccgcctcagcttccaaagtagctgggactataggccagcaccaccacagatggctaatttttgtaatttttgtagagatatggtttcrtcatatattagtctattttcacactgctataaagaactacctgagactgggtaatttataaagaaaagaggtttacttgactcacagttccacaggtttaacggaagcatgattaggagacctcaggaaacttacagtcatggaggaagacgaaggggaagcaaggaccttcttcacatggcggcaggagagagagcggagggggaagtgacacacactttaaaccatcagatctcatgagaactcactgtcatgagaacggcaagggggaggtctgcccccgtgatttagtcacttcccaccatgccgctcacccgacacgtggggattacaatttgagatgagatttgggtggggacacagarccaaaccatatcactccatgttgcccaggctgagtgctagattcctgtgtgttattttagggcactttatacttttattatttaccagtgtttgagaagtttatgatggttcacaaaactttctcttcctacgtgggtcttatgtgtgtttttgagtgagctgatgatacactcgtggccagcactgttctgtgctgtgtttctccacccagtgtgtggacatcttgctatgtgcacaggtaatatgtccttcttacacagaggggtgcaaaggttgagtcaaatcagcatccaaggagttgctgataaattgagaacttcctgacagcaagtgacaccaaaacctcaactaaaatgatcagcaaagatccattaagaaaatatcggccaggcacggtggctcgtgcctgtaatcccggcactttgggaggccgaggtgggcggatcacaaggtcagtagatcaagaccatcctggctaacacggtgaaaccccgtctctactaaaaatacaaaaaattagctaggcgtggtggctggcgcctgtagtccctgctaatcaggagactgaggcaggagaatcgcttgaacccgggaggtagaggttgcagtgagccaagatcacgccactgcactccagcctggatgacagagcaagattctgtctcaaaaaagaaaagaaaataccaagaaccagaaaacgggtcgtggcgtaaaccttggtgaggaccttggaattcaaggtgaaaggcagagtgtgccccagggagtggtgagggttcctgcagcatatgcagctgcatcccccaccccagcaccctgatttctcctcactgctcagctcctctggaatccttgccttcccacctcattggtggagctgctccattgaaacccaagactccattccaggcctggcctcagccccatctctgcccagggctgacaggggggctccgtcatctaccccagggcctgtgccttccttcttcctcctggtggcatttccatgttgggggcccctgcttgtccctggggtgcaggaattcttaagcacctytggcattttgctcctgccttcttgcctggagtttcactgctgtctgcaggcctttgagaacagaggcagggaggtgccagaagcccttgagagtgtggtgattaggggttggatgccctgtgcgaatggcaaggaggatgattcttgaaagaaaatgtcagggtaacttaaatttctctgaggtcagcttgcttgttgttaattaagttcttactacgagggccgagcgcggtggcttatgcctgtaatcgcagcactttgggaggctgaggtgggtggatcacttgaggtcaggagtttgagaccaacctggccaacatggtgaagctccatatctactaaatatacaaaaattagctgggcgtggtggtgggctcctgtaatcctggctactcaggagaccgaggtgggagaatcacttgaacccaggaggcagaggttgcagtcagccgagattgcaccactgcactccagcctaggtgacagagcgagactgtgtctcaaaataaaaataaaaaaagttcttaccaagaaagcagtgctaagtacttctccagcactgcttcatgtcggttggcttctccagacatgggcctctttgtggatgttattggaaagggtagtgttttaatatacgtgcgcttttcacatggattcaaggatggcatgggtgggtgggattactcgactttatagcatattaagtgcttatttggtgccagttatggactcgtactgggcagatgccatgaggaatgtacagtggaagatgttggattctgactgcaggagaggaaaccaggtattcgaccccccaaatagatgacagattgtgtggtacatcactgcatcattgggtgtccagacgagagattgcaggcaagacaaggacctaaagaaagtggcaagtgcactgaaaccaccagttaaggcctcctcagagcaggttggactgccctgagctttgaggggtgggtgtgagttgagatgggggagcattccatggaggggcaggagggtatggatgggagggagaaggacagtggaaggaggtggtggggatgggttgttctcttgggagcccaggggcaggagtggaggcaggcagcctcgttccacccctggtattcagagccgagaaaaggaatttggacgaggaggtgctgtgctaatgagaggcagtattagagatcctgagctgacacactggaaattgacatatgggcttatttatttatttattttatttatgttttaaataaaggttaagatcttccagagaagacataggaggagaaatgggcattatttttccaggggtctcttagtatgtaaataacctgagttcttaaaagttttatcttatagaatttttttattagttcttttatttttgtcatgggaaaaattcagaagctttcctggaaacttgcatgtctgctttcagagttttgtggctcttacaaggagcccctttgggggtgtggggcaaccttgcatcccaggaagccgcctgggagattctagggctggtacctcctttccactcagctgcctgggagattctggggttggtacctcctctgcattcaggctgcctccatcagctgaagaggcgagagtgtcataacatgacattctgtgtatgcgcaatgtatttgtagaagatactgatctttggatccggcaatcccattcctgggtatctacccagaggaaaagaagtcattatatgaaaaagatacttgtacatgcatgtttacagcagcacaattcacaattacaaaaattgtggaaccagcccaaatgcccatcagtcaacaagtagataaagaacatgatggagtactacttagccataaaaaggaatgaattaagggcatttacagcaacctggatggagttggagaccattattctaagygaagtaactcaggaatggaaaaccaaacatggaatctcctcttcatcctttttctgtctgcctttccttgttctcatacttaaagacagcgtgttgggagcggtatattgctgttgtttttgtcttctccaatctgaccacctatgtcttttatttggagtatttaatcccttgctttttgtttgtttaataatccctttataaaacagctgaattataaattgatggataaatttatagatgttgaaaggcacaaatctgaagtatgcagcttaatcaggtttgacaaatgctgacactcatgtaacccacactggcatgtttgcaccagattaaagaacatctccatcaccagtctctgaacattggatgcatttaccggtggtgttgggtatatttcttccatactcccgtctggaatctgaacctcttgatcccatttgcctcagcaactctgactccttcagactgaaactttctatcccacagtattttcttgtttccatcaagaaaggaagagatttaaactctgttctgcaattctgtctgcatttcctctctggaatccttctctctctccaaacaaagtggttacctctttaaaataggcagtgaacatcaaggaaaaccttgcataggctgaaaagggcaaagtgctcacctttgcttgcattgggaagtaatttcttttaagtgtgcatagagacagactaataaaaaaatctgttgagtgtgtcatgtggcagtcagtctttagaagtgttgttcctttgtcttttaatcattctcagaattagcacaccagttgtgtgatatgtaaaagtctattcctggcagggtgaggtggctcatgcttataatcccagcactttgggaggccgaggagggcggatcacctgaggtcaggagttcgagatcagcctgaccaatgtggtgaaaccctttctcttctaaaaatacaaaaattagctgggcgtgtaggtgcatgcctgtaatcccagctactcgggaggctgaggcaggagaattgcttgaagctgggaagcggaggttgcagtgagccaacattgcgccactgcactccagcctgggcgacaagaatgaaactctgtcccaataaaaaataaataaataaatcttttccctagctcatttttttttgactgtgttaaattcagtggagcaaggtctcatttatatcctccttattcataatttggggtaattagcatagtggttgggctgccattcacctcttacagctaggaaaatgaggctttgcgagasgaatgcaaaaatataaacaggattaagtcattgatggcatgctcatacttcctaggagaattaagtcttttcaggtaccacagtatgtatgagtccttcttaactctcatttccaccagatctccaccaaggagtttagaactgatggactccaagtctccctctggatgagacattctgagttcttgccaatatcatgctaagctgggttgataatttcctttgaaaaatttcctttgaaaatgagtagcatttcatcttttggaaatttatcattcttcagacttttcactgacctgtcccctcccatagcygaccccctcctgtaccccagggtttgattgatatttgcttttgtattgtaattactatttaatatccagccctcctgargtttgyttcactgcagtcacattgtattgcaagcagaaaatgtcacgtcgcctggagctgttggggtagtgtggttgtggtcctttgggtatttcctggcacacctggctcatgacatcgtgcagagctgaacaggctctaggaggaggaaggaaaccttgcctgggtacttaaaattatctatcacagtggatcctgagtctgcctctcagcctgtcttgaatgccaggctattataaatcagctttatttattttgtgtttgaattttgactttcctgttcaataatttaatattttaaaatgacacctttggtcttttatttgtcataagcgagggccgagttagccaccctgcaatttgcctctgtactctccgccccccagtgtgtagtcgttagctcataattgttttcttaacctcctcagagcctggtgtgatcttgctctcaaccttcttgaccttccaaggtagttaaatgaggttttgctttctctatgaattaattatgtcatctctatttgaaatgttcctgaacccatggtgctgtattttggcaaaataaatactattttcagagactgtaagacccatccattttatttccttttattagaagatagaacgattttcttagatgagcagttatcagctgatgttcaccttcttggaggaagggactgctggcggttttacttcaaatgcagccatttgaagtatctgatttggaacattccatacctggtgcagaggccacttgtttctacaggtttgtcctggtggtctgtcctctgtgccattgaactcccagagtcctctgcagaggacatgtaataattcttgcctattaatttgtggaccctgtatgtggggctttttttttttttgcctgtttgagacttcctgcctttaggagtagacaatgacctttcatacgtttaatgcttctgttgttctcaagtttgagaatgtggtgtgtcccctgggtcccctccttacatgaaatccaacccaaagggtcagtgtgtttcttgtgtgtttctgtcttcactcctctgtccgctttcatctctttcctggtgagtctctgccctgtcataagcaaataaccttagttgtttcctccccagtaatggtggcttcaattgctgtggatttcctggcctgatttcaaggctaggggaaaatgcctgtgtcctggttcagaacaggcagtctctttatttcttctgtcttgccgtggacaaatagaatcgtggcccttacgagttctttctaaaaaaatcacctttattgaggtaaaatttatatgaacaaaaaaatagaaccatttgaagtatctgattttggatcattttgaaaatgtcccaaatgtcctctcgtcaccaccgtaatcaagagctggaacatttcgccaccccagtgatctccctttgctggcccctggcgatgctcatacatgtggtggttcttcacgcgaaagcagctgacctcaaagagggtgaacatgagccctgctttcctttcctctttgacttcctctctgatccatccctaaactacaggattttgtcatgttagttcctattttctattaccatgaatgactgttggcgcctcaggctggggaaggttaattgtagtaacaaagaagaggttttcctggcaggaaccatttccttactcaggaaacaaacgctttcctttctcacagtcatcttctccttcttatgtaagtagaaatattaagccatactcagtctgtccaggtcctgagaattggtgtctgcccgggtctgggtttgtattagtctattctcacgctgccaataaagacacaccttagactgggtcatgtataaagaaaaagaggcttaatttaagggactcacagttccacatggctggggaggcctcacaatcatggcggaaggtgaaggagtagccaaggcatgtcttacatggcggcaggcaagagagcgtgtgcaggagaactgccctttataaaaccgtcagatcacatgagacttattcactatcatactgtcatgagaacagcatgggaaaaacccatccccatgattcagttacctcccaccgagtccctcccacaatacatggggatgatgggagctacaattmaagatgcaatttgggtggggagacagcccaaaccatatcagggttgcagaggcttatgtgggaggatcaagagtgacagcaactgtctggctggaggggaaggagacagaacctgtccctgggccttcgtctcctttcccygtgccccacacctagccctggggagcccgattccctcctcacactcccttggctcccttcttgtctctgtacacagccccaagcacaaaacgactgctcattttcctggccatgctgtgctttgctgtctccrtgtctttgtgagcagggatctttctccttggaaggcctgttctcttcctgtcttccaggacatctgcctgtcagcagtcagccttctatatccactgcagaggccatttgtttctgcagatttgtcctggtggcctgtcctctgtgccattggactcccagagtcctctgcaaaggacaccatgttttcattaaacacatagaggaggcatgttggcaaatgtcatttgcagatctgtcttctctagcagggcaatgctcttggccattgaacattttgcctggcatgccacaggttccaacactttctggacaaatgaataagtgaactggagatcagtaagttattttgaaaatgcacctgctgtggcatttgaggagatgtaaaatacctggtgccctcccttcccaggacccctccaagctggacgagcagtcctggctccttggtggggcattgtctggtgagccttgagggcgtgcttgggtgccagcgatctccccaccctttgctttgttagtttttgctcctgacctactgctttgatttgagaaacccttcggctattaaaatatgagttaatcatctaagaaactcactaactgaacttcatagtgaggaagtatgcttcctgttgatagataataaaacagagtggaataatttgaattctttataatggatgtgattataaatgatttccccatttactcatataaaaggctaaatggaagatgattagtgagttctgttttctgtttttcctaaggtgattttttaatcttcccaacaaattcctgcgatacagggaagaaaaagaaaaacccattaaaatttgcttaaaatctttaagaagccatttaaagcttcagaactgagtaatctttctgcccccttagtatattatggcacaggagagaaaacaaattacaggcaaccactctaccttgctttaacgtagggttaggattgcttgacatcttctgatcacattattgtgctgctgatacttgtcataaatgtagtgatgagattctggatgtaaaaatatttataatttcccatctcttgttatccctaaaaaattaatatttgtaatgggtctaaatccttctaaatcccattatttaatattgttctgcaatttgatgattaaagaattgttatttttttacctcctttatccttaaatccttcacccataatctcctgtttataattgcaggtgtctaatgattcataattagttaattcttggttggtgagtgattgtttcatattgcaattaggaagatcatgcataaagccatttctagttaaatgtgtgtatgttctttaccaggcttgtgttcaagagttctgtagttaccacgttatagtaatctctgaccttatttttgttaagcaaagacatctggttcaaagaccctctctcaccagcaagcrgttctcattcaatctaagcatgttgaaaaaggccctttccctaaatgggcttgggagcaatactggggtcgtggctgtcctcagggtgtctgagcgcttctttggtagtctgcaggggaaaataccaacactggtaatgccccattcagatgcagtattctgtccaacraggcacaattgcctgcctgggaataggaggctgagataccattgattgtttcctatgtcacttgtcaagtggaacacaacacaagtgaatgtctgcacaaaatgtactttgctatacctttctaacgggtttacatgagggratggagctcaaacttcacaggatattctatgcagagtaggtcttaccctagggatgctcctgctgctctcaytccacctgtcctccacccaccaaggcacagagactccagcaaatgtgaggaagagggtggggattggttgatgggcagagctggctctgtgaaagggggttaatctgaggcatcttacctcctgaagacttgggtgatgggagggagatgtttctggagcccagggcagctactgtggcattgagaccaccttagcctgggttggcatggaagactggaaatcttgcctttattcctgtcttgttcgttgtcctctgattgaatctctgcgttttagcccattgtcttcccaaagcttgattctcacctcttcctctcaactcctggcctctgtaataatggagaagccttgggcctggaatttggaggggaagaaagggaggttaagaatccttatctttttgctttcttcattatgtggcttcctygatctttttgtacaacagtaagcaggcttttatgaactagtagatattaaaaaccacatcagtgccaactaaacaaattatatccaccagatactttkgagccctctggtrtgtgccaggcaatattctaggcatggagctctatcagtgggcagggggtacaggtggcagtaatatacagctgaccttatgttctcatcatggcaaagagacagtagagaattgcattatccatcagttagggataaaacaacaaatacccactgctgtttattatctctgtcctcttatttaagaaaggaactcttggccgggcgcggtggctcatgcctgtaatcccagcactttgggaggccgaggcaggcggatcacgaggtcaggagattgagaccatcctggctaacatagtgaaaccccatctctgctgaaaatacagaaattaccagggcatggtggtgggtgcctgtagtctcagctactggggcggctgaggcaggagaattgcttgaacccaggaggcggaggttgcagtgagccgagattgcgccactgcactccagcctggcaacagagtgagaccccrtctaaaaaaaaagaaaaagaaaggaactctttgccttcttagagcaggagggaactgagttcttcatagagaacagatctaaattatagaagccattattattatttttcaccatttttcttattgtatcacagtccagttgtgggacattgtggatcactgcaggctgcacacaggcatttgggaggcatgacttctttctgggtactgtgcctttttaaagcctttggtgattttattcatacttgctttcattcaacaaatgttttccagcaccaactgaaggccagatgctatgggaggtgctggaaaggtattagagcctcatctcttcaggagttcgtgactcsgtgcggggatgcaagagggattcagtgagggagacacaccccccgccccttacagtcctgttctgtgctgctgttggrtgaaactgctctgcaggtcttaggaaccagccctggaaaccccacctcccatccscccacccccggtgcaggaagggaacttagtcttcattatgtgaccacccacttatgtagacttcccacatttccccccaaattagtccccaggagctgagtaaccttctctttgagtccttataacatttttatctgaaatgcaaaaacacatttgcttgaaacctccatgctagtttggcatgattttagaagttacctggcagaatgaatacaaaagaagcaaagaaatttaacatgaacttggcattttcttgytggcatgaacataattattggatgtcattataaataaaccttttaaaagtcactttaaaaatagaataattggctacattgcagagatcatgaaagatcatgaatatgtatataacagttaattaaaaaaaactgctaatattatttaaatgggtgattgtggcttgggaaaaatttttctgtggttcttaaaaagtcccgtgtcttaagcacttcagattgacgtaaaatgatgacgaaaatgggtcttggtgatgatggagacactcacgtcaaagggacatgtaaaaagttagtgtaaaatagttttatgaaatggagagtggacgaaactactttaatattcctatacatgaatattagataggcatgcataattaaattaataacgtgttttagtaggcacttggcttttatctgtatctataaaagtgtaaatacttgaggtggccaaaacttgacattttctcattgtaatgcaattcttatttaatccagagtcacctcactcatagggacagaaagcatttctatagagcgggattggtagaagaggggttcatggactacataagcctccagaaggccaggggatgtggtcaggctggtggaaggaaaagcactctgcagcttgttcttagagcaccaggtttattaaatatctaagtgggcatttttctaaacgagtgactttcttcatgatatgtgtgtgctgaattcaaactatacttggcaaagtaatgtgagttttcaggagatgggcttataatttttcatgcagcagagggagcatcagcttctcaagtggatgctgagaagttctgtgatgtttagagaatccagttagatggctcactgttttatgacattgaacctagttttgactgagtcacagaaattcatgccgggctcagacgctgatgctaacaggggcaggggagtggagtagaggggtgctgctttgtggacctatcttggggagaatattgggtagagtgttggtccccggagcctttagggtagattgtggtcctgcgggcacttccagaaaacagtcagcggctaacctggggtgggcgagggagactccttaaagttagaccacagtccccattctcaagaaacatcccccactcttgctgaagtgtccctgtgcagtttagggtagtagccaagccttgatgaggttactctgatgaaatgtaagtagcattgtagaactaggaattggcatcatttaggaccatttacccgaagtagaaccaaaataatttggtattaattggtcattaaatagataaggaaactttggctacaaatacacatcttggaattacatggggactctcaccctggacttcctttgtcatagctttatttttatacacaattgtattgatcaaattctagaccttacaagctccacagctgaattatttaattctctctgatgatcgtctcaattcattttccaataaatgtaattattttcttgccagcgttcgtatttaattgctaagttttctcygatttgctctaaatcatcttttacaaatgcgtagtgaaaggcagcaggttttctcttctgatggtggcaattataaatgtaattttatttaacttgataaccagttcgctgccaccaagggcctcatatttttctttatcatatgtttgggcacactgtgaaatcatcaaacaccaaaccttttataaattggatgtgcatgcttttgtccttttcgcttattattgtactgtttaccgtcgtcttctgtgacattttctcttgccttcagtcaattttggaagcaggcacattcttctgcaacaaaacaccatttttttcttgattgtaagcagagatgtcattcccgtgcttgtgttagatatacccttagaaattattaaaagctgtccagctgcctagtggttatgtgcatggtagatacctcaactgtgtttgtttcgtttgtcctggatatatgtctctgaactcttgcttttattgaaattaatctcttgtttctgttactgtctctgaaaataacaatgattatggtgctttttaagtaactcacaatgtgtttaaactatgtgggaaagagaatgtgaaaggtatgttatatttattttaatgttgcccctcaaaatgaactggaagccgggttttgggaggattccatttaaatgcatttatgctgaccttttcatgattctcatgtttaattgtattgcacttcagagtcacccagcctgaaagggacttagaatcccatggttgccagttggtgtatgactgcgcctccctcagtggtcaaaactgagattaaaaagaaagggaaagccctgtatttggaaggttatatccagaggagttcagcacccctcagagtctaaggggcttcctggtgatacggccccaccgctgcagagaaatgcccccagcctccctacttagtgcaccaggggtctggaaccctctctccctaacacccaagaccatccatagctcggtcactccccacagacttcacccgcagccatgccgcagccaccagcacctaacctccagactcctgaggaagctaggcggctcccctgtgtcacctcggctctgccatccttttccctgcccatacacatggagccctggacacggtggcccgcactgcccttgatggagtgccttgtccctggacccctcccgtgactcagctctgctcctgttggccttcttgtcttctgtctctggtcagcctcttttggtctctcctgtggactttgcttcttgcccctgttctctgtgtgtttcttgatgctctttcccatggccactccctggaggcccccacatctggattcagaccccctacccctcgggcctcttgcgcctcctccacctagccccttcctyctttttttccttggcttctcctgtgcacccactttgtttccttccattctgctgttcactccagcctcaatctccactctcagtgacttactgcttccttctcctggggacctcaggaaaacggaggattctgacccccacacctaagataataggaaagagcctccctcccccaggagagggggctgcccctgcccactgcccctggccaagtccrggcttcaggctggctctgcctttccaggccatggatgatgtttgaatgaggccctgggcagggcgtggagatggagtgagccctcgagtcctgggtggtggatgctcttgtctccaggagagatgctgcccagtgctggcgtgtggacaccgtgccatttagtcttccccaactagcttttcctttggaggagaaaagattgtctgacttgtggcaatacttttagttccataactgtaaacttttctttctcttttttggtggcatttataaaaattccctgtcctacatatctgaccacatttttaaaacatttattagtttggatgttcatgtttaaatcacatgatgtaaaatgtttgttgagacacagctgaaggattgttgaaaagcaactgtagagaagcagcaggagcttgtttaaggggtgggaggtgtgggcggcagttctggacagtgattgctgttcgggacactgggatgcttctcctttctggcttcctgggattttttttcctgggcaggttctattaaaccttgcttaatgaaggcactggcactgatagtggcttgcatttggcaagacatggctgttcctgggtaccaggcagtggcaccggaactcattaagaaggtgactaatttcagggccgtgttracatagactgaggctccatcatggttcccaggtgtttgtcggtcgccgctggagaccattgtgtggatcagtcacatggtctgctgcagtgtgagtgacagacggtgacttgctatcagtatgcaaaggtcacccggtgactattccaagaagtgtcattttycagtggagaatgggactttttttttttcctgttaataatttatttcttaattgcggtaaaatacatawaacataaagttaatccttttaaccatcttaacacgaacaattcagtggcatggggtacatttacagtacatcaccactaggtagttctagatcatttccgtcaccccagaaggaaaccccacagccgttacagtcactctgtttcccccttcacactgcctggcaaccacgaatttgttttctgtctctacgattagcttcttctgcgtatttcatataaatggcactatagaatatgtggctttttttggtatatggcttcttttacttagtatattctcagggttcatccatgtgttggcaccccattmctgttcatggctcggtagtattccattgtatggacagaccacaggtgtttatccatttatctctggatgcacacctggcttacttcaccttttggctgtagcgtatagagctgctatgagcattcctgtacaggcttctgtttgaacgtctatttggttttttttttttttttgagacggagtctcattctgttgcccaggctggagtgcagtagtgtgatctcggctcactgcaagctctgcctcctgggttcacaccattctcctgcctcagcctcccgagtagctgggactacaggtgcccgccaccgcacctggctaattttttttgcatttttagtagagacggggtttcaccatgttagccaggatggtctcgatctcctgacctcgcgwtccgcccgacttggcctcccaaagtgctgggattacaggcgtgagccactgcgcccagcctgaacgtctatttttaattcttttgggtatacatcgaggagtgaaactgctgggtctgtttctgttgagttgactgaagaaaggatattcgttttattgctctatctacatggacctctcctgcattacttcagtgagttgtgaaggttggtctggatcgctttccctctttcctttttgaattgtgcctttagctgtaggttgaacacaggtgctatctttcacgttttcagatctctgagatcttcactggggatcaaggtccaaggaatcaaagctcatgctgtgtttgctcctgagcaggagagagcrttgtttagagggagggagaaggggaatgcttgaggtcagaatcacaggacagcaaatccgtcttgagatttcagaaatcaccataaatctgtgtcccttcccagagaagagcgtgtcaaaatgcagcattcgtaattgaagaaagcaaaatcagctgactaagtcgtaagacctaggatggtgaagagtctcagagtgaccaaaaacacacagaccctgttctcagggaagctcctgtgcaccgactgcatgctctrtagacccctgccctgtgggggcccattcatgcttacagggtacatcctctgggagaaagcatgacaagttggtacyggggaacctgagggccgggatgaatttcaggataaaaagagcagacttagggatgctgccatagtatatcgtctagatttgtactgccctattgaaattcaaataaaatacagctaaatgttccatttctcagtcaccctacctgtatttcaagtgcctgatggacacctgtgcccagtggtgactgtactggccagagctgctgtagaatagtcccatcactgcggaaagttctgctggtcaggtctggctggaccgtagacacaggagtggccatagcagtagtgctgggagctgagaaggtgcccagtgcacagaggaggatgagctggatcggggaggagaggtcaggatttgatcctggaaaggtgtcattgtagtcctggctctgtcatcgctcagcaaggcatcgctcccgccacagggccccagcctccctgtgtgcccaccacgggcctggcactggccgccctctgtgccactcagggcaggagagtgagggttgtgccacacatgggtccgattgcttctccatggcgagaagaggacagacactgggaggaaaagttgaggaaccttgacatcccatgctgctctgtcatccaagtggctttttggttttctaggcattcttttttttttgagactgaggatcgagcagttctcctacctcagcctcccaagtagctgggacttggtacccaccaccacgcctggataatttttttgtatttttaatagagacagggtttcaccatgttgccaggctagtcttgaactcctgacttcaagtgatccgcctgcctcagtctcccaaggtgctgggattacaggcgtgagccaccgcgcccggcagacattcatttttattacaatttacaaaggtattggtcagaaacagaatgaaaatggaaggaaatcctagtctttccccaggtcatgggagaatccttgctttaagtgtctcatggggtggggtgatgtattcgtccctcagggctgctgtcacaatacaaacgaggggcttcaaacaacatcagtgtgttctctcattgttctggaggccagaagtccaagagcaaggcatcaccagggccgtgccctctctgaaggctctagaaggctgtagggcagaatccttcctggtctcttccagcgtccagggctgctggcagtcctcgatgtgctgtggtttgtggctacatcatgctcgtgtctgcctctgccttcctgtggtgtgtgcagctttgcatctgaatctccctctcctttttctttctttctttctttcttytctttctttctttctttcttcttttttttttttttttttttggagacagggtctcgctctgtcatcccggctaaagtgcagtggcgtgatctcggctcactgcaacttccaccttccaggctcaagtaatcctcctacctcagcctcccgagtagctgggaccacaggcatccaggctggagtgcagtggcatgatctcagcttactgcaaacctccaccttccagggtcaagtaatcgtcctacctcagcctcccaagtagctgggatcacagacgcgtgccattgcgcccacctaatattttgtatttttggtagagactgggtttcgctatgttgccttggctggtcttgaactcctgagctcaagcgatcctcctgcctcagccttccaaagtgctgggattacaggtgtgagccatcgcacccatggcctttttttttttcttataaagatagtcatcattggatttagggcccactgtaattctaattggagtttatctgcaaagattctgtttctaagttcatttgtattcacaggcaccagaatgtcctagtccattttgtgctgctataacaaaatacctgagactcggtaaaatacctgagtaatttataatgaacagcagtttactggcttgcagttctggaggctggcaagtccaaggtcaaggtgctagcattaagggccttcttgcctggtcatcccatggcagaaggtgagagtgtgagagaggatgagagggtgccaaactctcccttttacaatgacccagtcctccctatgtggctgagtcctcatggcctaatcacattattcctaaagttcctacctctttgcctgcctgtagtcccagctacatgggaggctgaggtgggagtatcacttgtccccaggaggtagaggctgcagtgagttgtgatcattccgcagcactccagcctgggcgacggagtgagaacctgtctcaaaaacagaaaaacaaacaaaaaatcccacatcttaataactgttacaatgtcaatgtcgattaaatttcaacttgaattttggaggggacagatatttaaatgatattacacrggttaggtcttgaaatttttttggcagggtcacaattccatgcactgcatatgggagtggaaggggtatgcctgcgggtggggagccaggggcttgagctccactctgcattcactttttgctctaccccaaagccttcccttcccctgtcctgctccctctacctgtgagtgtctgtgtaccctggccatcctcgatggcagtgagtctgagtattggtagggtgggctagagcctgggacagcgaggcagctggagggtggttgagggtggacgggtgcacgctggacaggcagaatattctgcgccattttgcctcgttcctgcatctttcttcctctgctgtcctgcacacacttatcttctacccacttctgttcccgaagggctccattttgtcagattattcagaccatgaataaaacacaagtgtgatgtgcttcattccccactcactgtttgcaaaactattttcctgcagttcagacccttaagatactgtggaactggaccgttttcctgtctgtcgacttctgaattttaagtgtttttcagaaagtctccatcatttggaagtcacgctttgcctcctggaagctgtctagacaggtgaccagttttcaccaatttgggggctatggaggcctcttccaaggctctctgccctctccatgagccactttagctagatgactgtgctggtatcaagtgaaaaaacaaaaagaatacttcagtaatttaattcaaatttgttcttgcctagattacggtaatgctcctatttagaatgacttaattcctggcaagtggattgtgggaggttaaggagagcaccctggctccagagcagagagcagaagagggtgttcttgctgtctgtgctgaggttggctaagtctttctctttttcacgcctcgtgctttttgctacgtggtttctgctgcctagctagtcatctgcaaggcatcactgtagccctatcctgatgccctgagtcctggtagcttctactctgacccttcctgttcttttatagattattccatccttgaccacattttcttctgttctcctgtgtgcctagctttggggaaataaggatgagtcaggtgcaggcttcggttgctcatttgaacagtgattctgactactgttagagaagggatatgggagagaagtgcaggggatttacttagccaaggctgaaggcagagaaaacggtcattgctgcatggcacagctacctgtggccagagaggagccatggcccagctcttgctgggctgacccaaaggccgaggaattttgtgtgccaggcacccatctgtgacacaaccacgtgggccaggaagctgtgtgtgtgtgtgtgtgtgtgtgtgtgtgagcaattaatggacaggatccagagatgctgagagcagtcctgcacagtgaagacagtatcaatatccctctccctgagaaacccaggagacccgttcctcatcatcgatatgcttcaaggaaggcataacaaattgatttgtgtaggaacttgaactggattcactgaagaatctcaggaagtttgtacttttttcagtttgggctttgtgatacagaaacacgcagatacttgtgggaacaacgtccctcaggcgttaaattgacatttgggattgagtgaaccgaagcattggtggtagagatggggaatgctatctgaaaaaccagaatcagctttaaggaagctgattacaaagagaattgattacaaaaagtatttttggatttaaaatacataagatgtaggcagtcctaatttaataagatataagggattgaagcaattgttgccatcgtctttctttttgttctggactgctgtcacacacrccatagagatgcctccttgagtgtcttcaaagtgctgtggatttcctttcttcagccgcctccgaccatcacgtccagccatctgtcctgtytgatcaagtccgcagagtgggtcgaggggcaccaattggcagaactggtcttggtgcattttcccctatcaagtttatctgtttttccggaggctgtttggctcttccccaaatcttccaaagacagaacacttaagtctaaaaggaggatttgtggaccatatatattttagctcaaaacctccaagtggaatcattttaatgtgcgttttcttgagaaatatgtaaattaataattgcttcatacattattcaagaaaaacttatttygtatcacccataactcttctmatcttatataaagatatgctaatggatttaattaaaataattatactgaataatgtagcctgaactttattctaaaatagcatctattaatcatcatcatcagtaatatttttagccagagagacacttacaaccttaagctgatactagatggaaagtgcatttattgttttatttttcagtttggattaagttggcattctcatgagatctgggacaattacatttgcttagagacgagtataaaatttatttctgggccgggcatggtggctcacccctgtaatctcagcactttgggaggccaagacaggtggatcacgaggtcaggagttcaacaccagcctggccaacatggtgaaaccccgtctctactaaaaatacaaaaattagctgggcatggtggcacacacctgtaattctagctactcaggaggctgagacaggagaattgcttgaacctgggaggtggaggttgcagtgagccaagattacaccattacactccagcctgggcaacagagtgagactstatctcagaaaggagaaaaaaaaaattattttatttctttaacctgaagtatttcagcaattagaaaacttttagcctcttctgccctttcctgtttcttcttttccctctaaagctttggtttcagtgtgttcttgtccttttggttcagttttgayctcagtttccctcccaagagttgtgattgctgaatacgatgagttcctgattgcctggatattaagaggtgaaccaaatcttaagagggacactcagcagcctgcctgtcttaatataaatagaaatagttttaccactggctgtgattctctctgattttgtttgtgttatctttctgtggcttgctggctttccatcagtgctcaatgaatggttgggagcccttatgcatttggtggtaatttcagtttctccttaggcctctctcatgcctgagtgtgcatgggacccaggtatgtgttcttggtgtgtcagtgggtcctgcacacgtgttgattggtccgaggactaaatgcaggtagaatcagaccgtccccccactggtggacagacgaaagctttaccaagttgatagaataacataagccaggacttaaactgccattaagttattttacctaagtttaaaataaaatctgaagaaattacttgcttaaatagcaaacatttatttggtaagttcacttataacttaatgaacaggcgaagagtaaagaaagctaaaatcagtgacttcctctaaattgtgtatagagtactcttctctgttcttggctgggccaggccataatggtgtattcgtacagtttcatggtccatggttcatacctctggggttggggagcataagtgggcctcactccaaacgcagctctgtcttttggggacatcccacggactttgtcctccttcccactttcgtccctcacccccagtgaactgattagtgattatcccgctctgctgcagggaaccttgccagtgcctgggaggcaccgtggagcagatacctgctgagggactggcatcctggcctctcacccacaattcaaaacagctttgcacattctgagcacagttttatttaaataaagatcttcactgatttacaaaaataacaaaaggcaaacaaaaacaggaaaaatcttcaatgtcctcaatttctatcaccctgatcttttttgtgatttgggaactgattctactcartatttgccacaatgaagatggcactttacaaatggaagtttgcaccgaatgaagattcaggtttgagagatgtgcacgctgaggaggttttccatgtcaacacgtgcatgggtccacacgctgtcctgccgccactgctgctggtagctgtggccaacgtctgttgagcaggagcaatgagtcgagcttatcacatgcacaacacgtcattccattctcccacagccccttgaggcaggccctgttgatcaccactgttttgcccatgagaagcccgataggaaatgctaccttcccaaattcacatagcgagtgatggaggagcccggacagcaccccagagccctgacctygtctaccatggtgctgccttcctttgatggtgctggttagggtcccccacatgcattcatagatttttatttttggaggtgtctttcggcagataagattccacgcagcaccatctatccacagggcagatgtcccctgcttcgtctgttgggtgctctgtgtcttgacaagctattgaggcaggagctgtttccactcgaaagagacctgaatttagtgaagcagccagactccacagaggaaactgaaggtttttcctgcaagcacaagcagaatccaaaacacttgaaactctgacaaataaccaatattagaaatgaatcaagctaggtgtggctcttacaatagtgggtaatggaaccctcctgccaaggaaagccagagcctgtggtaggaaggaatctgagttccctttgcatcttgtccttgtctggctaatcaractggayggggaagacaactttttcccttagttaaggaggtgatttctgtggctgaatgcagagagaggaatgcttcttgaaaataaagaggtcacgactatatatgaagtttgcagtcagtttgggagtcatggagggtcgactkcccaatgtcctctgtgaggacagaaggagacaaagcagactgaaatagtctctgtccttacctgtgaggagcttattgtctatggggaatacggacaaattgaccttccattgcagtccaaataggaatgtctctagatgctgtattcatctcttttgcgttgctataaaggatacccaagcctgggtaacttatagagaaaagaggtttattttggccccggttctgcagggtgcacaggaagcatagtgcagtcatctgcttctggtgagggcttccagaagcttctgctcatgacagaaggtgaagggggagcaggcgtgtcacatggcaagagagggaacaagagagagcgcagggaggtgccattgtcttaaaccgccagctctcacgtgaactaatagagcgggaactcactggttactgcgaggaaggtatcaagccattcatctgaaaccctcccctatgacccagacacctcccactgtccccacctccaacactggggatcacgtttcagcatgagagatggagaggacacacatccaaaccatatctgattcctaacctggcacctgtgtgtcctggacgaaatgatgtctaagctaaggactgaggggtaccagagtctaactgtgtgtttggggtggacttgggtggggcggcagagcagtgactccagaagagggaatagcatgtgctcaagcctctgagctggcagaggggcctggcccacctgggaaactggaagaggctcggcttggtgggagagagtcctgcaggtaccaagggtgagtctggggtggtggggccagagcccatggccctccatgggtgtgggataggttccctgtgtcccatgagcaggggacgttgccacagtatctaaattccatttgcattttcagaaggctgctctggctgcccagtgaggagtgtccttgaggggtcagcgtggaggcagggagggcgggtaggaggctgtggcagcaaagccaatgggaggcagtagcsgtgcggcccaggtgctgtttgttccggggggagttaacagcctgaaccgagggctctgtcgctgcctagaagggggctgtgaggaagagagaacacccggtgtgatgcccaggcctgtggcatgcagctggggcttggcggtgcagcgcctggcactggaatccctagggaaggcgaggcagcggtggcttccaccaaggcagggggagtttgcaatgtctagggtcagccagggtggaccccggtgggtgtggggtgtgggtgttgggctcaggaggaaggggagccctggagatggatcagaattgggagtcattggcatggcaggaggtgaggtcccttgtgggatatgtggagggaccccgaggaacccacaggcaaggggctgggggagcagggccctgcgcagggagctggaaggagggtggagaggcaggtggccaccctgggagtgagggccacgcgtgccccagaggtgaggtggccaaagtgtcatcagaaaggccacttgagaacagcctgaagtcatcgtggccttggcaggaacagagctgtggtgcgggccggagtcaggctgcagtgggagtgaggaggggtcgtgtgggaagtggacgcrggccttgcccacactgtggggtattgtccgatggagcagaggctcgcagggcctggggctgcttttccgggtgagaggctggtgtgggcttcatgatagaaagcaggaggcagaggggtgagaactgaaggctctgaggagagagagaggacaaagggcaggagggccttgagcagacagcaggggaagaggttggagccccacagggcaggcaggtgccccgaaaacccaaggcaggggcagaggttgggagctggagtcttgtgtttggtttgggtggttggaagcttagcgagttcctttcttgtggtggcttttgtttttctctgaaggaggtggtgacatgagatgggaggggtgggggtcaggcttgagaagagcaaagaaagactgagtcagccacaggggagagtggagaaggagaggaaacccggcccttcaggagaacaggtggacccacagtgtaagacgtgcctctcctcatgtttcttctgaattccgttctctctgtcctgtctttgttctgtcacccaggactgatagcagatgcgggttcctcccagttcttgctaaacctcatttaccgaaagacacaaaatcatcttggtcggttaagcagaattctggtttaatcagcattttgggatcactggcattccatgtccccgcctcagggggcacaaccccttctctgagggtgtcatcatgacatttttgatgctaggagctcgggaagaccacggcagggaagactttgggagccctcgccccgcttggcggtctgtcggtcccgattcacacagygtccggcagcccaaggggagccagcagcaggtgggccataaaggcctgtcttgtttgtggccgattcaccctggtgaaatggtatttatgaacttgctacaggcggttgatgctttgctgggcacagtataaaatgcatgaagccagttcgtgcctcaccctctgggcgttygcaagcgaaacgagagaccgggagactgagcaatcagcctgtgtgaacgctggctattaaatgtcacaataaatgttttctgttttttttcaaagcaacactgaggttgtggaagcagaacatttgaaatcagaatgaaattattackatttagtgctcttttgaaaagttgcatcccaaagcagacggttgggatctggtgggccttgaaggacagggcaaacactgaggtgaacaacagcatggatcgttctggagtggagatttatggggctaaagttgctttatcctctactctatttttggtgaagttgaagtgtggcggttttgcaaaattagctttggggctgcacagaccaaccccaaatcccagcagtgctgacctgggccaaagacttcactttcacatgtctccactgtctcctccgtgaaaggggatagtaataggcctccttcatcaggttgccatggggatgtaatgtgtccatagagcccagcacctagaaacttgtctgacaggtgcagaatacttacgtcatagatgaggcaacatgaactcacttgaaatgacttgacctgtgcaccagagttgagacaccagcctgccattctttcagtcatttcccatcccagatagctatggaaatattcccaggtaatatattcttagtcacttaaaaaattaaggtataggctggacacagtggctcacacctgtaatcccagcactttgggaggccgaggtgggtggatcacttgaggtcaggagtttggtttgggtgttgaccagcctggccaacatggcgaaacctcgtctctactaaaaatacaaaaattagccgggtgtggtggcgggcacctgtactcccagctattcaggagactgaggcagaagaatcacgtgaacccggggggtggaagttgtagtgagccaagattgtgccactgcactccagcccaggcggaagagtgaaactcagtctcaaaaaaaaaggtacaatttacatacagtaaaatttattcttttttaatgtacagctctgccagttttgacaaaggcataatgcattcatcccacgggagggcccctgagccccctgtattcccctgcccgcttccccaccagccactgacatgctctccatttctgtagttttgccttttccagaatgttatgaaaattgagtcacatgggatgcagcctcttgcatatgtcttgttttatttatcactgtgtcgttcacgtgcatctgtgttctaggtaacagtggttggtgcttcttgttactgcgtcragttccrttgtatgaattcccctcttgaagggacatttgggttgtttctagtgtttggagattacaaataaagctgctagagacgtccacataagggttttgtaaccgtcataggtttcctgtcccatgtacgtgccaagtcaatgtgctgcgactctgggttgcagcagagaaagagttttaatcgtaggaccgccaaaacaggagaaggaggaaacctcatattgtctgctgcaggagtttggggctaggtattgttaaggttttcggagcaggcctaagtgggttgaagagcgtggggtgaagggacagggagatgaagaaactgcattgcattgctgattcctttcctctgtcgggggttttcaaaccagttggcagcagcagtttccctggaattcaggatctgagaaacaccttaagcaattcttaaacaaaagacttatgattctaatgtcagaaatcctatctgcaggaacgttggggatgcagatgaccagtatctagtgctgcgtgactttggattacgagtaagtgggctgaagtgcagcctgttccrtgcttaattatcactgtattgctgtccagagttcttgttaaccttatgaggatgccttcagtttttgtgaatgtaggttttcacttcatttgaggaggtggccaggagtacaatggctgggtgctacggattatgaatgtttacctatgagaaactgctgaactctcttctaaagttgctgaactatttttgcattcagactagcagtgttatacaaagagcatgttgtaggaattctgttttgttttcatgattcttatagatgttgcttgtatcttattgtcattttaatttgcatttccctgatgagtaatggtgctgagtgtcttttcaagtacttatttgccatccatctatcttctatggagaattgcctcttcatctcttttgcccattttgcagggaggggaagattgttttctcattattgagttttaagggttctttgtgtattctgtgtactaatctttagcagatatatgatctccagtcattttctccctgtgtagttcatcttctgttatctcagtagtacctttcaaagagcagaaattctttattttgatgaagtccaatttatcaattttttcttttacacattgtgctatttgtatcatatctaagaaatctttgcttagcccaaactcacacgtattttcttccaaaagttttacagtttttgaagttctacatttaagatcggtgatctatttaaagttgagttttgtacagtgtgagagaggagggcatgaagtttatttatttgctcatggtactgtgtacctttgttacaaatccatcaaccgtctgtatatgttcaggggaatacttttgaagtgagtttctgcctacttgcttttggagaacaattgtaaaaattgtttctgtaattgcgtagtattttccagtgttcaaagtgttaccctattcattttccaatttgattttgagctttattgcaattccttgaagtatctggcgtgaatgttattttccctcttacttaaagacacaggtagaaggtggcagagccagagtcagatcacttaaaatctggcaacttttcccaacagaagagagcaaagggactcagggtctgactttcccccgactgaatttaattctagcttagttcagtactagctttgtgaacagggacaaagtaattaatgtctccattgttggttttttcctccttcctactcagctaccttctaataggaggtgatatggtttggctgtgtccccacccaaatctcatcttgaattgtagctctgataatccccatgtgctgtgggaggggacctgtgggaggtaattgaatcatgagcagcaggtttttcctgtgccgttctcatgatggtgaataagcctcctgagatctgatggttttataaggcgcaattcccttgcacaaactttgttgcctgctgccatgtaagatgtgcttttgctcctccttcaccttccaccatgattatgaggccttcccagccatgtggaactgtgagcccattaaacctctttcctttataaattacccagtctcaggtatttcttcatagtaggatgaaaatggactaatacaggaggtctgtaagaattaaagatcaaatatacaagggtcctagcacagtgtgcagcatgacaggatctatcattaatatcattactctgttttttgagggtgtttgttttctagaagatacattactaaagaacaaaatgattcataattaaaatatatgcagatatacaggaaaacatttttggaatggaacaaagacagttgactttaatcattgaatgtagaagagttgaagtgaatttaatggaagaggattattctgagggggacaggtcttcattttgctttatcctcacagagctctgcaggggtaaaaggagaaaatcacatgcatgcttagcacacagtataggcacttaggccacaggtgataagtgttggcttctgttaataataattttattatgtgtcaggacaacctgtgagaagttagcattstttgagcattctktgtaggttagagattcattttcttttttgagacaggatcttgctytgttgccggggctggattgccatgctgtgaacacggctcactgcaacctctacttcctgggctcargtgattctcctgcctcagcctcctgaatagctgggactacaggtgcaagccaccaatgcctggctaattttttttgtatatttttgtaaaggtggaatttcgccatgttacccaggctggtctcgaactcctgagctgaagcgatctgcctgcctcagcctcccaaagtgctgggattacaggtgtgagccactgcgcctgatgacttttgttctttgctctattttcatcgtgttagccgtcagcccctcatctggaagtgatctttctcttctcagtatttctgcggttcttctcataaggattacaaattggtatgaacactccctaacctgcatgctgctcagccttcttgtttcttgatttgcagggggcagcactgaaatacttaccaacgatcgtcaacgatgtgaaattggtgtttgatcccaaagagctcaggtaagtatgcagcccaggcgaatgcttgtcacgtgccgtgtgtgacctccttctcagtgtgcttagtttatgggatgctcagggttctgcctcatgtctccatatgtcagtgccctggatcattctggaacatgtgttgctggtggtgtctgtgactctttgataatcatgacattatgtggaaaaggtatcaccagtcaactatgacaacattttttaagaagattgtttacagtctaattggtatataatgtccatttggcattttgcatactttgaggtttgaatttcagtatgtggttgttggttttgctcttgttttcagcacctaaaaatcctgacataggagctttaatattcctgcgccggcttctgcttctgtaatagaggcaactcctctttgggaggggccctgagcctcaagcagaagactcagaagttactaagaaaataatttttagaaaaccccacaaacaaactttgagaaagctggtcactgggctttcagaccaagsagtgagattggacaccaaatccttccttttmtctccctaacttgccgcctctcagtggccaggtgtgctgtttgtttcctaatctgttggtatcactgcattctgaaagtgccattgtgagcaaatgggatacacagcctttttaatttattttttaagagataggggtctcactctgttgcccaggctgtagtgcagtggcgcgatcatagctcactgcagcttcaaactcctggcctcaagcacccctcccgcctctgccttcaaagcactggaattaccgacgtgcgccaccgctcccaccccagggatgcacagtcgtttaaaccccagacattcaatagcacagtcctcaactactttttgttttggttttgatttgacacaataaactacctgtgggtgaagacaccattttttaccggccaatgaagccctcctaaatattagtaaagggccatctgtccactgagcggtgaaacggaataaaaaatgattatccttcctgtactttatgtctaccataggtcactcgtgccctggaattgaagggcgaggggctctctgggaggcgctgtcccccacgaatcattgtgaatctgatgttccctaggatttagtgtcctgcagggaaacatttattttctgctcccagggcaccaacagtgctggtcataagcttagcaggtcctacatgagaaaaggagaaacacacaggctcacgggcggtgtctgcccacctggcgcgctgtagagtcctctccttggcacatgcttctccaagagcgggccccaaaatggcagctccggtagcccttgggaacttgttagagaaagccaaactttggcttcctccccagaccttctgaattagaaactgcacagtggggcctggtcatttgattttaacaaccyccctccccgtgcaggtgcttccagggctctctcatattttagtagctcaggtcttgaaaaactgagaggaagcagagaaagctgcaactggtgtgggctgtggccatactctaggcctgtctcatggtgcacacagatcagctccgcacccgcggaggggtatcgtcgatactctcagtttgcgcttgagccgggcctgtcctcactgtacgcacaaattagcccctcaccgatggagggtatcattgacgctcacagtttgtggttgagccgtgtgcttggaggtcctaggaagacctgcttggccagggccgatgcaggctgctgctggcctctctcagatttgtgcatccctgtgttcctcctcaatgcctgttacactgatttttaaaaatgacattgaaaatcacatacatatttgtttctatttagaaaattggttcatgttttaataaacagaagagatgacagaagagggtaactcaaacttaagtccactacccaaaagaatcagaaagtgctggatcccttacacacatacgtacacacacacttaaaaaagtcaccattttttggttaggcatggtgactcacgcctgtaatcccagcactttgggaggccgagggggacagatcatgaggtcaggaattcgagaccaacctggccagcatggtgaaactccatctccactaaagatacaaaaaattagctgggcatgatggcgggtgcctgtaatcccagctactcaggaggctgaggcaggagaattgtttgaacccagaggcagaaattgcagtgagcctggatcgcggcattgtactccagcctgggtgacagggcaagactctgtctcaaaaataaaaaaaagaaaagtcaccattctttgtgatcagctcctgcacttaagacatcttcctctcccatgccacgagggcatcttctgcatcatcattgttagtaactttcatgccgatccatcccatgctggcctatctttaagcagcaacaatagacgcagcatctattatgtgctttcaccatgtaaaataggttttgcacaaagcacttgtattagtccattaatctttacaacaatggtatgacataggttctattgttagccgaattttatcctcaataacttgtccatgataattcagctggtaaatggcagtggttcaaggccaacccgggctttttgaatacaaagaacaggcctctagctactgtgctacctgatggctgttgagttgtattcaagtttttttaaaaaaaatatattataaaatgctaggataaaatttcctgtagcttaattgtagtttctgctcctattttatatcattaggataaaaagagaaatggcattacttggttttgcattttcttaaaggattttcagtagattttatctactcgtccccctccagaaggtaaaaccaacattctaccagtatacgttggtgtctgttttcccaaaatattgctggtactgggaattaccattttatagaaccttgccagtatgactggtgaaaccgtatctgcccattttaatttgtgtttatgtagttactaacaagagctcttctaaaatttcttcataggtctgttagccttttgtaaaagtgtatttttaaaaaattgctttattgtggtattatttacaaacgataaagtcacctattgtagacggttcaattcagtggtttttagtatatttacgaagatgtgcagtgatcaccagagtccaattttagaacatttttataaccccagcaagatcccagtgtccatttctggtcatttttccttcctagcccaggtaaccccgaatctcttttctctctctacacatttgtgttttctgggcattttacagagctggaatcatacaacgtgtggcctctgtactggcttcttctacttagcataaagttttcaaggtttctccatgttttagcatcagtgcctccttgtttttggaaatgaattgtgtggctatactgcattttgttcatccattcattaactgatggacttcgtgttttttttactttttcagtataatgaacaatgccacttggattcatggacaaattgttgtgtggatatatgttttcattttttctcggggaggtggtatatgcctggaagtggatggtgactatgtttgacattttgaggaaatgcctaactgttttccaaagtggctgtgctgtgttaccttcccaccagcttggtgtgactgttctcatttcattatatctttaccaacacttgttattgtctgtcttttggattataggcacgttagtgattgtgaagtgaaaacgaacactttcaaaacatcatttcttggaatgagttattgaccccatagtgcatgagaggctgtgttgaacatactggtgacattaatgaccatgtgatgacctatatctcagtattgtaacaacattggatccttttgctrtgtgtctcaaaattatttcccttgtgtttttcctcacagcaaaatgwttactgaattcatcctcaatgttcccatgggcttgctgaccatccagaaactctactgcttgatcgaaatygtccacagtgacctcttcacacagcatggtgagtggaaccccaagaattattcacttgtcctgttatttattttctgaagacattgaccctctgaattgcctcttcttgacaaaaggagtagaggctgcaaccaattaaaactgctgtattacaagacaggaagatttagcccttacaagagaagggtaattgacatgtaatgcaggtaatagatcattgagaaatgaaggcaaaagctcgtagtttgtaatttaggtatacaccaaagtcctagggtaatcagcatacattgtagcctttaagatatgtgrttgtctgtcctggggaggcaatcacttcgctccattgtgatgattgcaaggaaaagaattcgagttttctttaaatctgaaagtaatggttttatcttattctgaactttgcattctttgacagcatttcttcaaatcctactcaaagtaataagaatttcaatgattcttcaactcatttatcctgcagaacactttatatttccctatgttatctccctgccctttttagtaatcattttytttctatttggacagattaaattaatattttacccttgtcaagcagttttattgaaagcttaaaacctctgcataattccacaaacttcctcatttattggaggcaaatgtgaagtctgttgagtgacattctgactgagaagcatggatttattcgattccatttgtgcctggacatttggctgctccattcattttctgttgtcctcattcttggtgttgttctcagttcccctgtgctttcacggatcccagacttgggatgtccctgttaagttacgggctgggtttggaacacactctgtgcttggcttggtcctttgtgccttctgggatgygaattttaatcttctttcttggcttaaccttataaaatgcaccagagtgtacacgtgttgctaaggctaatattgaaagaaaatgttgacttcatttaggtgagagtgttcttctctagaaaaaaacacatcaaaccaagaagtgggtgactttctgcagcccctccatgtagacctctctctttagtcagaaaccacttcttactttcataaaagaaagtcakttctcaccatggtctgggactcaaagcacatgacgctccattgagctattattcctgactgtccatatttcagtttctcactggaaactgaattgcccactcaccaggtgttttccaagacttgggtactctagggggcttaaggaaaggctgatgatagaggtgatggccaggcaccctgcttcagggtttcctcctacagtgaataagctttgtaccacagcaagtaaaatcctccgaaaattttatatctgggtcttattaggtgggttactgatgctcctaaccattcaatgccaagacacacacagcgacatactgcatcaccagcactaccgtcatcagtatcttcatcaaattaacagctgtcaatgagtgtcaaccgtccatgaataacaattgttgtaaattgtcgatgaattgtgcttgatttttcttaagtgttgatttaacgaagatcttcttcaggatatatttacatatatttttaaatttctgttgcaaaactttgttctgtatgtcatttagtttctttgaataaggatgtaagccatgaaagattcaattagatttttttttttttttcgagacatagtcctgcgctgttgccgaggctggagtgcaatggcacaatctcagctccctgcaacctccgcctccygggttcaaatgattctcctgcctcagcctcctgagtagctgggattataggcacccaccaccatgcctagctaatttctgtatttttagtagagakggggtttcaccatgttggtcaggctggtctcaaactaccgacctcaaatgatccacccgcctcggcctcccagagtgctgggattacaggcgtgagccaccgagcctgaccccagatattttttcctctattaaaacttgctcatttytttaggtcgtagaaagcttgaaggaaacttactgtttatattcgaygattttgttagcttaggtgtttgtaattgtgttctgtccctctttcctatgccccatttctgtttcattcttgttctctaagccttttatcttagacagcctgaagtcctgttttggaagtatgcaggatgtgaataactgcttagctttgtttaatatggaattaccaggtcatgtaatattttgaaataattaacctgctgtcatctttttaagtacggaattaggattttgatcttagtataagcaagttgtacccaatgtagtaaatgaggttgtatgaaatatatgaatcccaaattattgtgggctaaatgaaccaaaattagcccgaagcttcgtgtcttacaagcagccccagaattgccccatcagtagaagttgtctaagctgtaactggcagctcaaatgtacttctaaatgcttagtggttgcctagaagcatttcggaatgctttggccaacgtgaaaatggtcccatttactgtctttgagttttaagcgtttttcttaaaacaacctgtttttctcatctgcaagctctctgcttgttcaaagcagccaacagacatcttacctcctggtcaggagagatttatcaccagaaatcttccagttggtccattcttacaaaagatgtcattacttttgcaaaatattctgtgccacctttggtataacaatttaaagccaaactgttttctgatgagacatgttgaatctgattttcatgcttttttcctgtttcttgttaatttgtacaaatgtggttgtttttgtcctgtttcctgatcccagtggaatcagtcaaatgaactctctttgtgttcagatttctagaacttggtataactggatttagctgcatgtgccactgaatgcacttgcccttagtaaacatcctctggaggatgtgttcagaatgtgtcactgtatgtgtcctccaggctccttcgtgggggctccctgggtgaagtgagattcccaagtctttgcttctcagcttgtgtgttgccttactcactgaaagagacccactggttgctttgcactaaaacatttctttttatctccgcctgatataatgacaagtrgatctgtttgcaagaggctggcagtgaattctgaaactggtgttgttcctctgcagaaaagcctttcgttgccaggtctgggtcccagtaggccaggccttacagtgccttggttgtttctggccttgttttccccatttctctctcttggagaacatggaaaccgtaggtgcatcctgagtttgttgggcttcataggaggcacgtctttgggcttgtcaaagcaagacarctctgtgtggtccagtccatgtgggactggcctgaatgaggacaccaggcctgcgtcactgcggccatttgctcacagagcattcagccttcctctgcccttctgttctatccaggccctcaaggattagatgatggccacccacactctgcaggatggacatgcttgactcagtcccccaatcccaatgctaatctctgctggaaacatccttacagacacactcagaaataatgttcagccagctctctgggcatccgtggtgcagtcatttggcatttaaaattaaccatcacagagtatttcttccaagaggcctgtgattgccctgcttaaaaagccccctacatgccacctcatggctcctcatggcacgccccccatgtggaatcattgtatttcttacttgcttatttgtaggccttccataggatgagaactttccaagctgggccttgttcatctagattttgctcttctgctggtacctagcgcatgcctggcttcagcatgcctgtaatggatatttattgaatgaatgaaatgcttatgggtattcctaaccaggaggcagtacagagaaagaagcaggaccagctacacacatgtgtagttgacttgattgaagggaggtaaaggtttggattcacatggggaaattggcaatctttccttgtcttagcattgaatgaattgatcataggggagaaaggagaggtcttagaggaggagtaacatcaggagcaaagggagagggagaagagtgagagacttgaggtgtgaagagtcttctctgagcagttttataaaatcaagatgctcttctatttgcatctgatctaatcattcctgttttctggaaataggaggggggtgcagttcagatctgtgcattcaagataccttttggctataccttttggctaaaactatggaaaatttcaaatatacaggagggcagagagaagagagtaatgcatgccagtgtactcatcactcagctccacaaattatcaactcatgatccttttttttctttcttttttttttttttttgagatggagtcttgctttgttgtcaggctggagtgcagtggcacgaacttggctcactgcaacctgtgcctcccgggttcaatcgattctcctgcctcagcctcctgagtagctggtactacaggcgcatgccactacactcagctaatttttgtattttcagtagagacgcggtttcaccgtgttggctgggatggtcttgatctcttgacctcgtgatccaccctcctcagcctcccatagtgctggggttacaggcatgagccaccrcgcccggccagtccatcttttcttatctatatgcccgtcccccagatattttgaggcaaatctctgccatcacagcattccattttttgtcattttaaatgtatggtggtaatacagagggcaaacagtgttcctaagaagaggttgtgcagaggagctgatccccatgctgataaggcatccaccttggatgttcccacccctggccctttgctgaggtagagggcctgtgatgcattagcatactgtgtgtgagtcagtgaatgggcagtgtgtgtgagagtcaataggctgtgatggctttaagctttgtctcgccatgtgacttgactacttgaaagctggttgatagattacatgcttcaccaaaagatgactcttgcatataatctgtggtgtggagtgagcagattttcaaagcaagatagatacaaagagaaggaaaagtcaaagcttcatcatttgtgcatttgtagctttgtttccatgtgattatattgttgcccacatagctgacaaaagctgtgaaaattaaagcttaaatcttatagaaatgaaaagttttagtgtaattaaacactagaacactgacgtttaggatttaagctcacaaaattgtgtaacattaatgttatagaaattggaataaaatgaatcaagctgagctaacattgacttttaagttagtaaagagcattggctatacttgtaagaagcctttgagtggaggtgagagtcctcctggaacatgttctctcacccactggcccctttctgaatctgacagctttgggaagcttgtttcaatgaacactgggtcacttatttgctttgcaaggtataatttttccatattcccatttctatagtggccaaagcagtggacaggttttctttggagcttactgtgtacttatcattttgtcctcacttagtttgttttggatgggagtatgagactttgagagtaaattttagtggtaaggctacccctttttggtcttgcaaatagttggatactctagatagattgcttttctgtaagcctgctctgtgtagttttctgtttgtctgtttgttgtttttctggtggttggactctggcagtgagtaggaatgggaaagaggccattccctcataccctggctctcctggggctcctcccttcactatagcaaacaggctccttgtagacagtgttcatgagtcttttcaaacttcatttgctttcatttttgagcttcttgaaagtgtaagcctgktaagtttaaattattttccttattcttattttcaaggtgaatgattcttctagttatcaagcagagtaaaactctcctttttaatggtggaaacattagttacagcagccctttgaaatctgagggcaaaatcccagacacttactgggactagctattaggaaatattgaagtcagatttctacactattatcattgtgatttgatccatgatagaaatttatatctcaaaaattaccctattaataaacttattatgccttaaattatagaaaagttgcgtgtttaaaacaaacccataatataccttcttaatgttttgataaaagcatttttgattaaaaaaaccaaaataaaatctcttgagctttactrttgtggaaaayagaaatatatcgaaagggatcttaaacctggagctactctgcagtagttttgttaacttgatagatgttgtgcagaaggaaaaattggggttggggtcaattttgccacattcacttaatgtaccactcatatagcattctgcagtactttaattagatagttgtgctgatgacttctgatgaacggtaccagctgtgaaccctgaagactgattcttttaaataatggtggaatgtaaacatcattttctcttctgtttctttcatgccttgagaaaactttttatctgtaatactgcacctttttcatccctcattctgtatatcattctctgtctttcattatatatgtttttgaaaagaccatttgttataacactgcaggattttagaaatgacttattgaatgtaggagggtgaactcaatttcaggtttttaattgtttcygtttcaattccatcataattcattgaatatcttccgtgtgctcagraccattgattagcgagtttgcttcctttgagagtcttcagagtcatctacttaaaaatgtagaattggaaaagagtgattatctcaatgctcagataaggacaccagagttcagccagaagcctggcagggagctgtccaccgccgtggtgctgattgaggaggtggcttcttacaaatctatcagcccactcttttcttaaactgtttcacacccaccatatgagtaatgcattctgaaaactgaatttacttcaaatgccatatrgagcaagacaaaatacaaataagtgaataaataaacatacaaataaattaaatgtataaagtatacagtgttgtgcwtatatgttcatggagttttaatagtttttctcttctttctgtgtgggacctttatctgtgatcaaattggtggtgccaacagtttatggtatagttggtgtaaactttatcatcgtctgttgagttctgctgtcacttctgggtgggcttctgttcctgttgctggatgttgaatgcaagaagaacgatctgagaagagactgtgttggttgtgctgtatttagtcatgtgcacactgggcaccaggaaagcaagtccctgagtctctttagtacatgatttcttctagctcctggtagctgatttctgtaactgcatgatgtgttgtctacagtaactagcctgggacagtggaaagagccccaggtcagcatgcagtctcctaggttctgctttaggacctctgtcttttcttgggcataaactcctccctgggtgcacagtccttccgctaagatgaactgcaacacaatatagggttttgacatatgtattttattgtcagagcaaccaggaggggagtttgtgcaggaccacatgggccaagacctatgtttttttgctacctttattctcctggtttaaaaaatacccaccattccacagccctgtatattctctctcagttttctcatcctccatgtggtgagatcctgcctgcagactgacagccctgtaaattctttctgaacttaacacaagccacatccttgatgtacccccttccacctagaaaacagacttcctgcctgaccaattcttctcacacagtgttttctgcatttttcttgcatcttgccaattttttcatctactgataaatgggactcatttgcaatttttctccattggctcttctttaatttcttycctctgacaacttgttactaacagagtaatggaagtttaatccttagttttccagagtaaaagatacaaaatatctgctcccccactgccttcctttaaaggatggctcgcttttttacaaagccttgtgccgatgtccagaaaacatatatttgacaaacttctttttcctgttgttcaatagtccacgtgctactgtgccccctccttccaatttccaacacccttttacttgctctgtcaccttttcatttcaaattccatgatactgaatacctcaagagtgaagtgcagattaccgcatttctaacaatttcagccctctgcccagtggccctgttccagtcagaacacgtaaaaggtactgtcgggcagcttggaacagaaacactgtacaggccatttgtgtttactccattttacagactaggaaactaaggtgcagaaaggaaaagtgacctaccaagggtaacttgatgttgatttattctctggtactgctaactttcatgacttgttaggttagaatgattcttgaaaaatttgctttgcgtctgttatgtaaaaatgcctgaatcatacagrtttacacacacgtgtacctgcatgggtcctttactctgggggctccagctgaggaatcaggctttttttttttttgagacggagtctcrctctgtcacccaggctggagtgcagtggcgcaatctcggcttactgcaarctccgtctcccrggttcacgccattcttctgcctcagcctcctgagtagctgggactacaggcgcctgccaccgtggccgactaattttgtttttgtatttttagtagagatggggtttcactgtgtcagccaggatggtctctatctcctgacctcatggtcctcctgactcagcctcccaagtgctgggattacaggcgtgagccaccgcgcccggccggaatagacatctaataattctgactccgatggtgcgtagaggtgcagtcctgaaggtcccttcacycagctcccagctcccacatctgtgaagtgtggggctaasgagatggctctgcgattccttccagtgtcggcaccgtcttctgtatttctgttgtttgaagacttgaatggagggaggaaagcacgtgaacatgttgaaacctgtgggtccaggattcttagatggttggaaaataagacaattgactatacaagatgaatagcaaacaccccccatgtatatgattcttactgtttaattcttaggaaaagtgttattctggatctcagttctatgtaacacagagttattaaatgcactttatggatcatttatttaatgtgaccaaactaaaaattaagaagtacattactctgttcataaaaatgaatgttttcaatggacaaattcattcttgtatttgcatcttgctttaatgtagagctgtaatggggttatggtcagatattctgcttgggcatttataagctgataatgcttattgaataccttttataaagattaatattttttactctgtcctcattaccagagcattaatcatcctggcttcggcccttgcagctgaggatgaacagatgttgaattattgctgtctgtaatcattgtggwtcacactggggaagggccgtgaaagggtggctggtgtgatcytcacagctgatttgcatggagcctggctacctttatagctctgtgcatggcagaggaaaccaggatagctgtgccagctgattctagcttcctcgtaggtcaccgtagcctaagtcagcactgacaagcactggcggtcctggagtcacgtacgtgtgacagggtgtctgataagagagagctgtggccatgactctgcttacaataaatgccagttcataaaaatgagaagtcacatacaaggtctttaacatcggctttctagcattctctgagactgtgctgtccagcagaaatagaatgtgagccgtgtatgtaattaaaaatattctagttgccacattttaaaaaatgaggcaattgatgaaatgaattttagcaatgtattttgtctaaaacatcactgcaacgtgaattctctctaaatattactaatgatacatattttacattctttttatgatatgaagtctctgaagtccagtattttacacttacagcacatctctgtttggatgtgaaattttcaccagacacttgatctttattttcatcattgaatataatttacctttgaaaaatgagattcacataccccaattgttccaaacattggtttctaacaagtaaatcaagtagcactttttacatttgagtttatattaattacaattaaataacattaaaaattcctttcctccatggcactaattagatttcacatgctcagargtttccatgttgggtatcacagctctgaggtattagttttcttttgtgtccttttagttgaacagctgactttgtataatactataccttctgttaaccaccatttgttgtaggctcatatttgctaaatacacacatcgtatcatttagttctcagtcaacctgggagacgaccaacagcatccccattttgcacattagaaaaattaagacctagagagtttaagtaactcttaaacgctctagatacaaagcaaagagccagcagggggkattgcattatttctttatacgtgtgggtaaactgattaaaaggctttccccaaatcccataaagtgacccaggttcctggacttctggtcaagtgtttgttccagagtattcaaaagatgatgtgtttttctttaaaatataagacccctcctccttttttttttttttctcctggtggattatttgttggcttcccaggccatctgttttggaactaatgggactatcagtgccaaacctgtagaaatgacattttgtccatgggaaaagtattcaggacatttaggtgtgttgtccataggaagataggagattcctcttccttggctgccagagacagctgttcatgctttaarataggtcattgtagggtatatgtatatgtgtgtgtgtgtgtgtgtgtgtgtgtgtgtgtgtctatctgtccgtctgtctgtccatctgtctgtttttgtagtatacgttcctcagtgctcttgatttgctatcttaagacaaaattcaagagtcttactgttacttaaaacgtgtactcccaccacttcttgaaaaaacctatctgtagacagaaatatagagtaagagaagtcccttaaaaaatgaggttttaagaaatttatgtttttgcttttggggaaggcagctgagtggctactgtactggatagtgcagctgtaaggctttagttttctttgtatatttttagttgaaaaggctgactttgtatactgatatttgtattattgttattaacagctaccatttcttgagggttgagagtggcagacctgcttttaactgcagactttagtttgataccacatgtgcgtaattgcaagttaatccaagacacacacactcataccaccactatcatcaggccttggtttatgtgcttggatatgccatttaagaaaaataggaaggcttctgctcttatggagattgcatatcagcaaggaggaacagataattaaagcaatcagtatttcagtgttccgataacggggcattggaggccttcctgtacctgggtccagtgggggctgtgctgaggccagcagatcacaggtcaccagggaggtgcactccttggctttgctgccttcagcttcggtcctcccaccctctcctagtggctctggggaattgcctttctttgggggcctgggatgggttgctgtggaccaggtgacggacggtactgtaaggtgccatagccygtgtgaccctctgcctggaggcatggttgaaatccctggcatgggcagactgacctttggcctttagggaaagagcctcgttgccagcctggtcctcctcagtgacctggttctgttttggggtcggggtggagtttcctgatgctgatggtgccgggggagacctctcactgaggcatgttggatggctttttacacagtccttcctcaagcagcatctcattttgtctcgacagttaaagtagacatcgccccacctccccacttgatcttgactggccatggatggctgggtcatgaaggctgaggtgcagttggattctggtctatcaggatggttataacaattttttttttttttttacatcttcttgggggcttagtgaatgaaatgtctgtattgggacaaaatgacagtgacatttctaaaagttttgttgtttctcatcaggagaggctggatagcaaacaggtgaaggtagcgcagtcctccaggtggggtggatggtgaacgttaccaccaggtaaccaaagatggttgatagcatccyccagccaaagatgaacagacagacacctctttcttctcaccagagtaattctaacaaatgagaccagcacactcaattagctctgagaatagcacagaycacaactgcctacccagcatgacagataaatggtgcggtgagggatgaatttaggccaggacatctgggtaccagagcctacagggccagctctgctgtttctgagcccagtgctatgttcctctgattttctggaatcacttatggacacaccctccttccagcctgtactggctggtccgttagaccttttccctctcttgggtccrtcctaagcttgcttcagaagacggcttctaagcttatgtagtcatttttttccttagtcacattgtcaggggctgtcattacctgctcaggtyttagtggttctaactgctgcctctgaggtttcttggaaattcagcttgtttccagaatggtggcagtgctagggatgaccaagtgacagggttgggccagggctctccccatgttgaggttggcacagtgtgtgatgtgtttccagccaaagggcaagaggactcatttgggagatattatggtgggcaccacgaggaagagtgctggcagggcggggctcagataagggtgtgctgaggaagcattccagccagctgggctagagcatttggagttaaaccctacgtcggatgctgtgttgtggttaaggtcagcagctcaagagtcactaaagttggatgtagtttgtaaacatcgaggttctataggaaaggcattgagatttgggggtatttgtggaaatagtgtgtcccatgtgttagcgtttccaggctggattcactcccatgaggtcattttcttgttcatttctcttagactggctttgttctcgggtggctctaacactagggcagtctcctacacgggcagcccatcttggcactgtgctctccctcactgacmtcctgtgggattccasacaccacagccttcgaggctgacctggcctctttccagaagatgtgcagctcttagcacgtcatacatttcttctgcctaagtgttgactactggcattgtgaaattaacaggtacattcttattttcctwtattaattggacaaaacttcttgtaaaaatggagttgctctcactcctttcttggcgaatcaacaaaaaatggaattggggaaggccttggccatgagccgcccacatgtgatccgctggagacaggggagtagaggggtttgtgtttcttctcagtctttgtttctctctgcctgctccccagtccttcattacagtgtagttcttgggaaagttctaagtgtgctctgtgtacttagaggaaccattccaatgttgcatgcttatagttttcttatataaaagaaacattaatgcaaaacatgttttaatgtatctttaatgttgtaagtcttaaaatataaaatcctgaaaaccggctaagtctgtttaaggttttagagcactgctgtctcctcttgtgctctgcgtttaaaggaaacaagaatggctgggctagtgtcaaaacacagaactggtgttgtaaatagatagtccatgctggagagtggatgatgctccagctaagctggatttcccaactggaagagacaattagggattgcatttcacctttcattgtatttgtatctgtttccctgttgctctgttattttctgaacatccttcctctgykcttattgaaagaacaaatggaaacccaaacctgctttgcctctgatccttacaccatggcatcccttcattttatagccatgcgtcccagagtggggcctctgcacctgcttttcatttcctgttcctcctcagcccactccaggaagctgtcttgagaaggattctgtgtgccttaaattgccacattccaagattggcatcttctacctaggagaaggaaatcatactttggctcaccttggcatagatgagaaaagctgcaattcaaataatttgtgttgtaggaagtatttcttttaatgttgcaaattagtgaatttgtagttagagaaaattcattaaaaaacccgtgtgtggctaacatggtgaaaccccatgtctactaaaaataaaaaaaaaaaattagctgggcgtggtggcaggcacctgtagtcccagctactcaggaggctgaggcgggagaatggcgtgaacctgggaggcggagcttgcagtgagccgagatcacaccacggcactccagcctgggcgacagagcaagactccgtctcaaaaacaaaacaacaacaaaaaacaaaaaacccatgtgtgtttgtgtctgcatttatgtgcacacagtgggatataagtgtgtgtgtgtttatatatatcatgtatgcttgcaaattattatctgtttacctgggatacacacatagatgcatggaagtgtgtttgtatgtgaattatttacaataacagcagacacggtgttctcacagtcaagtaattgacccccctccagatgtcagttccacgtgttgcacaacgtgaatgcaaactgcttgaaagggcagacaagcttatagcaaacacgagttgcgtcttggtgggtttcacactgactggcaatgctgtgtcctgtgtagactgcagagagatcctgcttcccatgatgascgatcagctcaagtaccatctggagagacaggaggacctggaggcctgctgtcagctgctcagccacatcctggaggtgctgtacaggaaggacgtggtgagtgttggctctgtgcgtgacgtcctgccatttgcctgaacctgccatttgccttgcagtacaactttattcagttaaaaatgaamggtcttgattttaaggtctagcctctctttttgtctcggtagagttgcacccttaaattatttttatttatgtatatatggtgattattacaacatttatccttttgcattgaaaattgttctttatttcctgtgtcttctcgacgaaatgtctctcaggacctaaattttcatccttaaggtcagacaaaaaggctttgatgcttaaagttggctaattatctgcattctttcttcttatttttattaaagtaatacatgcacaaagttaaaaataaataaataaataaagccaggcatgctgagggagtcgtaaggagaagagcagctcttttcctcccctcaggctctcttcccctargtcagtgctttgcttttgtagctctaccctattcctttttttttttttcttttttcttttgagacagagtcttacactgtcgcccaggctagagtgcagtggcacaatctcagctcatggcaacctctgcctcccgggttcaagtgattctcctgcctcagcttcccaagtagctgggattataggtgcctgccaccatgcccagctaatttttttgtatttttagtacagacggggtttcactatgttggccaggctggtctcaaactcctgacttcgtgatccacttgccttggcctcccagtgagccactgcacctggcctaccctattccttttgcatttctaaattgtatgctkctttcagggacttttttaaaaatcagaagttggtgccagcccagcgaagtagctcacgcctgtaatcccagcggtttgggaagccaaggcaggaggatcgcttgagcccaggagtttaagaccagcctgggcaacatagtgagagcctgtctctagaaaatgaaagaaaaaataaaaagcaagtttgtgccagcacatatggaaaagtctgaccctgtgcctttcactcccaacataccattcctgttggagcacacacatgatgctattgatcttccaggtgtgcctggaaaggtgaaagcagggctttgtctgtccttgcccctagccctggacagagtggccaggatttctaagtagataaggcttgtccctggccgtttcctgcrtgaccttgaaaatccctcctagtcaccacgcccatatacctggccacccactccsctgtagccctggctcattctctcagagcctgattagtgatctggaagaaaaagatcggattaaatctgttcttggtgatgctggaaacctcacctcttacaggggcattgcctttggagaggtcttggaggccttcacccaaaggccagcctccagtggtcccacttcaggctcttccctgtttttattggagaaaagcttggggtaagagcttgtatggccaaagctcacagaggaggtggtgatgctgggaagggcctagagcatgtgtttaagcagattcatagttcacgaagaagaatcaacaatcgcatcccacactaataaaagagttaatttttactgaatgccacagcagtgtgaattttagatagtttgctaaatgctgtttaaacattctatcctgtgtgactgtttaagttatttgcatttgacgtgcagaaccatctaggactgttatctgcctgccttccatttacagatggccaaatatctttagaaaactaattggtgggctaatcagggatcataaacattatattgtttaaacagattttcttttatttttaaggtttgcttaaattaaattactatgattatatatgtaacaaattatcattaatggactataattaataaaawcccctgagtttttttgtgagagcttttgcctttgacaagggccatttttcatctcattaagggttataattgatttactctttacagggtaaatggattcaatgacaaccactggggcttgcatgttaatgtttctctggtgttggtgttcattggtgtgtccttccccaggggccaacccagaggcacgtccagattatcatggagaaacttctccggaccgtgaaccgaaccgtcatttccatgggacgrgattctgaactcattgtaagtgcttggtgacatatgtttggatatttaactggggckgacagcatccttctccaactgctgtttgaacatagcttattatactgcaatgtagtgagcagttgagatacagcttggtatataaaatgtcctcattttccaaatgaatgtcaaagttgaagggtaagcaaaccaactttaaagatggaaacatttggctcttgttttctcattacttacttatagcaaaagacatgtattttctgctgagtcgtcattcttctggcagtttctccatagtgtttacacttaaggtgccattaataaaattttatgaaggaccctaaaaagtaattgagattcttcaccttagttattttattgtctactctaatgtattgtaggtgtttttcttaaacagtaattaggcaggagcctattcatttttttcaagaatattttactaatttagacagtccatcaagtttctgatcatggtgccttttcccagggttcactgctgtcctcygcacccccttaccttaagtctgtttccttcagcaaaaaatgcatgagtagatctcgtttaatttttttttttttgaggttcaaggggttataatttctttccttttttttttttctttaatttctgggatacatgtgcagaacatacaggtttgttacgtaggtatgcgtgtgccatggtggtctgctgcacctatcaacccatcatctaggttttaagccctgcatgcattcggtatttgtcctaatgctctccctccatttgccccccactccccagcaggccccggtgtgtgtggttctcctccctgtgtgcatgtattytcattgttcacctcccacttatgagtgagaacatgtggtgtttggtgttctggtcctgtgttagtttgctgagaatgatggcttccagcttcatccatgtccctgcaaaggacatgaactcattcttttttatggctgcatactattccatggtgtataggtgccacattttctttattcagacacatgtacacgtatgtttattgcagcactgtttacaatagcaaagacttggaaccaacctgaatgcccatcaaagatagactggataatgtttaaaatatttagcacatgttatcatttaagtcatcttggtggatcctttccaaaaaatgacttgaaaggagaaaacgtccttttggagttttcccttgacatcagagaaggcaccctggtccttcctggtgcgtgaccgttgttcttgttgcatatctggggtgtgaacagggaggtgatgtgcgtcttcttggacagcatagtcagaacggagcactggggtcctttgcgtttttatgtctggtgtcaccacagaggactccgtgtcgtgtgcgtcacagacaggtcgcacagatggacaaatgctgccttagtgtgtttccatccagtgaaacagttcatgtcttagagcttcagcacatgtgaggttcagattttcctttttaaagtgtttaaacttaaagtttaaacttaaactcacattttcctttttaaagtgtttaaacttaaagtttaaacttaaacacttttaagtttggattacaacatgtatgaatcaggaaataaaatgtttccatgtaaattggctttatttacagtagacttttccattattacataaacrtaaatttgcctgccttttcttattctccatgataattattcatagtcttgaaacacatttggaacacattaatatggaatgggcactgagcccatggagaaggatttgcagtgactccacgagccacctgttgacccctgaggtctggcgttgacccctgatgtccagcgttgacccctgacgtctgacgttcctgtcttcttggagtcgtgccgcaggtgcactctgcacagtctcaggagtggaactggaaagggccttatgtagagcaaagagcatgtggcttgaacttgaaccaagtgtggttctgccaagaccctcttgggatgggcggacttagagaggctggggatgacatgatggcatgcaggggtggtggcagatgagggagagggtagaagtggaggcaggtggtctcatgagactgttttgtctctgtttaggggagcatggttctgcctgtgcttagggaaacatggttctgtctctggttagtgggtcttggtcctctctctccgattaggaggtcctgtctctggtcaggggggcacagtccagtctctggttagggggtgtggtcctgtctctagttggggcacaatcctgcctccagttagggtcttctttttttttttttttttttttttttttttttcccctgagatagagtcttgctctgtcgcccaggctggagtgcagtggtgcaatcttgactcactgcaacctctgtctcctgggttcaagtgattcttgtgcctcggactcccgagaagctgggattacaggtgcacatcaccacactcaagataatttttgtattttttagtacmgwtggggtttcaccatgttggctaggctggtctcaaattcctgacctcaggtgatccatccgcttcggcctcccaaagtgctgggattacaggcatgagccaccatgcccagccttatttagggtctttatgctaggtgtgtgttcacttgacttgtagcccactggtcaacagttaaactggagggaagagggcacagaaaaagctcataaagtttggatgggaagctgggaatgtggagagattataagatgtgctcacagcttcatcaaagggtagaatagaccctgcagggaatgatatctcctctcagaccatgtggtccaggatgtctttgagaaatttctcctatctcaggcatgataataagtgtggtagtaataatggcacctcttcactgagcatgcatttacgtgctatgcactctataatgaacaggaagattctcatttaattctcacagtgccctgcagacagacaagaaacagttcaagatcccacagctagcatggcagcacttgtttccagcctggatttggttcccatgtatgctgtcagtcccttctataagacacaggcacacgatgctgatggccgtggtccacttcagaagtcatcgaaaggactgagctgctcctagatccctgtcctgcttagggagacagctgttcagggaaataagcacctttctattttctrtcatgtcgtatccatggtccaactctaggatctccttgctagaagggccagaccacaagctaggtgcccatttcctgaagggcttgggatgctccagcttggaagaacccctgtgttctaaggaaccctgaggagttcctcmggaagaagccttgcatgttctaagaagggrgtgtgacagcgaggacccatgcttggtcttatccagagccacattgatatcaagcatttggcataggggtctaagcactgtccgggaatggaagaggtagaacaaacttcccacctccagaaccatcctccacagccctgatcttcccaaacagaagcctcaaagtgggaagaggagagaggtcttaaacggactcctcccaattccaccatctctaagatctgtaaagaagtaaaaaaaatccttggagtttcttttataaaatgcagctgtcttgaaaggactctcaaaaaaattctgaataagctataatcatttaatgagtgatgacaacatcaagatgttttcaagaagggtgttygccactgaaaattcgagttgtttagtgggaccttgtaatccccaaccagccacgagccccctctctggagtcaacagagcagtgtgagtgaaatgctaccctgtttaggatgcctgcccttgctcttccaatttgcatcaaatgtagatttgtgcattaactttttaaagtcgttgttgctctgtgaatttagattagaggaagatcaaggcaaaaagtatccctgacaaggtggacaaaaaccttaatcagtagaccttctagagtggaaaaagagtagaaaatagttcataggtctgttttgggtaggctgttccattccattatatcttagagatttcagcctttatgtgttactcatttttgctaaatatagtggaaattatgtaactatgaatcagcttaaaaattctaagtaatcactgaaaatgagtttttaaaaattaaagtgattaaaaagaactctgaaattaatatactttacttaatgatttattccatgatgttgtcaacaacagtactagaaatgtggcctctttccatcggaataaggyattaactgggaatgtgattatgccctgacagcttccccctattaatgtaaggaatagaaaactggggaacttcacacttaattagataaattgggatatgcaatataaggcttttctttatctgtgggattttacaaaaactcgactttgcagtcagttgtatattgtttgctttagttgattatatttgaaatgggtgattggaatgcgtctcgtgcctaggataataatgtgctatgatccgaagtattacatccttaagaaaaaaccaaaacaactctatttggcagttgcagaattgtagaccatgtgaatacctagcacatgcccagagacagaagcgttgcaataaccttgccacagaacaaaaaggtcattttatctttactctgatgtagtctgatgctgtagaagcatggagtgaaatacttatttttatattaagtcagacttcaggatttatttyagccttcgtttttgagaagctttctaagccctcagcattaagcagcatttttcctcatcacacacggatctgagcaggtgaccgcggctgggataggtgctgttgtgttgtgtgcaggtgggctggccagccattgggtgtgtgtttttcctagagtaagaagcactccaggctgagatgagagctgttgaaatgagtaacatttccgtctcctgtgatacgcgctgctgttgcttctttcaaatgatcagatttacattcttttaatgggtcctttaaaaatgtaatcgagtgagaaggacttctaaasatttttctttggcctggatacacacgaggggattggaaattactaattcatgaaaatgaaaatgtgggcttcttttaaggaaaaattccctttgaacattgacagaagtgggcrtagggaaggggaagattttgcctggattctccacttaactcttgtcaccactggagcatcctgactccctagacacaagtgatggaagttattttgtttccactctaaacactgtctcagggggacattgatgggatggtggagggtgtgtttcattgtgacaacagcatctttggtggggaatttgctgttggtgaaaacccagtgctttctctgagcatgggtgattgataagggcctgacatgctccttcatttggaaaatggtattaatagaattggtttcccagtgaatagtgccttttacccaagactcataaccaaatattttcacaaagatgttatatccccatgcatgagcattcattttgagatgttcattataatagagtttaagtatgaatgtgttttaaaaatgattttaaaatcatctgcaaaaaaatgttgtgtttcaaatggacagtgtctgggttttgtatagtcatcataaaaatgtctataattgtactgtttgctaataaacctrcctgctttcagaaaatcatcctaacgtgtgtgtgtgcaccaatggttttataagttcatttttctttggggcagctacagcaattttaggtttgttttcatattcctgtgaccctggtattttttcaaggttggttactagctatgggtttactgcagaagaagtaaaaaccacattgttgaatgggcacaatatgctctgcaatccttacatattcataccaaacagcaaagatatttgcaaaaccagactgccttaagttaatttttgcgcaacttaaaatgaccttgtcattgaccaaaatgtataggatccactgtagcatgatgactttatgccagttcatgaaatggatgttctttctgatctttgtaccacagagttgtttactttcagtaaataaagtggctgcacatgcagtgcctgcaaatatgctagtgatagagtttctgtaggtcaaagaagacgtgctggtgtgggaagcagctgctgtgatctttaggtgacactgctgcagccaaactgccctgattcataatgaaatcaactttcacttgctgataaaaatgctaaggaatgagtccaccagtgacaggttttctaaacaggccatggtgttactaacaccatgacatagaaaagttcatgcctctttcttgtttccttttcttgctgtcttctaggaaaggccagtatttgatggtctgtcttcacagttttaattaagagttgtgtatcttggttctgatatgcccatgtggtttccaaggaaaacagtgttgcaggccatcctccttgtgactgtttataggttggagttggtctgcctgaggctgggccatgactgtgacaccatttacacccagtagtccagccacatctcagatctctgtggctgtagataactaactgcctctcagggtacatgggaaatgctgccaactgcctaagttgtttccaaggtagcaaggttttcccatactttgagcccctccccatttatcttctgctggagggtcrgagattgaaggagcagatgcaggactacaggacttctgcttcttggaagtgagttgcacacttgtagagtgactggtgggcacccttcattgtatctgggtgtctgtagaacaggacctttgaggcagcaccaatagttggctcagaaatgattatagaatgagacagaaccctccctctgtctgctctgggctgtgcattgggccttccttccctttctgcatgtgtcagaagaggaatccccttcttctccctgaagaacatgcgatggtagcaggagccttgagtgtcggtctgcagtgccctctcccttgcacatggactctgtggttgcagatactgggaaaaagcattgtggcctctcctctcctaggccgtccaggtgaggcaaacaccagcccacgtgtgcagatgggttagtattaggctagtgtcagcaggagaggtaggcgctcagcctatctcccactagggaggggaagaagaaaggaaggaggcggctgatcccttgaggctggggatgtgctcaatggaagatctagagagaagctacctcccctgggccatggaggcaagatttacatgccacagtgtactgtggcaacactcaatgtatttagccatttcttctgaggttaagaattaaacctcatatacctcctgctatgagcctgtgtgcatcctaaaatgccaccatgtgttccggtggtgaaactccatgccagggtgcataggtgggcaagcgtcagtcccttccctccccaagccaggccagctctggctggtgggtcaggcccaggccttacgatgctcttgtcttctgcagaccggatgaaatgcctatcggcccaaacattcttcctttattattattttcttagattacttttatgttccccaatttttgaggccatgaaataagtttaatagccacataaaacatctttgatttttttatttaaaaattaataaagaacttaacgacaagtataataatttaatctctatatgcaatgccatgtgtacatctacataagggaaccctgtgcgttttaccttgcttttgtatcagmgtttttacttgaatctttccaagagaagaatcaccatctgttagtgacgtgttgcaattaaactatgaaatgattttgacaatagtttttctattttgaacacactttaatttttagggatgaattaatttatcttcagaagttcctttttgactctgaacatttyaattttatttttttttggtctagactggtgtgaaacagtgacattattttgtgtactaggatgtcctcttgtttagacagatttgtgttactaattagaaaactgctaatacccttatttcaatttactgagatagttgggattcttaaaacataaggagagagaacttgttggaaacatttttataactttagttaaaaacagtataaaaaacatgaaacccatttttaaatatttagtctacgtgaaacagttacacttccttcatgttacaggatcaacttcctcattgttcttgcaccaaaatatttctcagttccttttattgatattcagggattcgaacttcatatagtgtttccgcagaggatgtgtgtgtgcacatgtgtgttttaaattaaagcatacaactgcagtgttgtttggcccccgaagaatgtttacacgacatactcttcatttttttttcaaggcccgatctggttactgatcactaggtccttgtagaatcaaaacayttagaactaaaacagatttgctgttgagtcaggaggaaaatacatggcaagaagcagctccaatctgacaaaagcaggtgagatccttttaccaaggttagccactgtgtgtttggcatctagtcaatgaggtgtgcatgtcagcactccactagatgtgaaactgctggacagaaacttcaagactaggttttcctgtatgctcacaaactattcaaaatttaagttgtacaaaaaaaaaaaaaaaggcaaagtaagatccctacttcctattgtgaaaatcaaaaaattgatagacaaagtcattaatagactaggggatttgatttctataaaaagatacttgcaaaggtgcaaagaaatgagtgaaaaaataaaggaactaagatttacattgcaatgtgtaatcaagagagaactctaagtgttactgttgatttaaaaaatacctaaaaacatttgattcacagctttcccctaagtatgttgtttagtacaacttactaataggttaaatgtaggcgacattgtcccttggtagcagctaaactaaacgcactgtttctctttgagatggtcagggcttccaccattaatacaaagcataacgaattgtacataacgtctggctgcacttaccatggctaacagtgtctcggaggatcgatccacaaaaacactgtctgccatggcacagaatgcctgtgatttattggtgggtggattatccatcgtgtatctctatgtatgttctcagattcttgccagaatgtattatttggcctttgggtaccaaaagattaaaaatgagatctaagaaaacttagtgtccaatagctctgaccctgtctacttgcagtgattaaaggcatatcctgactttgggggactcctggctgctggccatttggaaaatgagcagtaaacatgtcgtaagtctggagatgaagaggatgctaaatttgaggtgtcrttgtgacactgagatgtggtcacttggcttagcgctatagcacatgaaggcaaatatacatatagtcacattttagagattattcatggtctccgaccacttgaaaaaattgtgctttctccggaatttgatgtgctgaaaattgcactcgccccctgcttatttgcaaaatgaaacataaaaatgaagtccttcgcaaacataaggcttgctttttcttctcattatttaaaaaaaaaatcaaggcttgaaaataattatgagttatagctgtgtacagggtgacagcctgccatctcgcaggttgataatgtattacttgcagatcgggggtgggggaaaatttttacttatcatctttgactacgtaagtttcatttcagattttacatcccacatcagtgaactgcaaagaacagctggcaaggagtgacacagaataccttgcttctgttaattatctattggtacaaaggcctttttggtacgcagggcgagaagtgggaggtgcctraatgggcaccacagttccctcgatcctattcattttggaaaagtattgacttaaactccagtgggttctaaagacggcctcgagactccagacaccgtgagtgttaaaggaaccagagtttccatcttccgtgctttttagattcagttttggatttttgcttgggagttgaggagtaagtctcctgagagtaaggcgaagktatgacctgagtttcctcaatagggtggagttttcttagaaccggctggagtttgtcttcttgctgcttaaaatccagctccacactagaaaagagagagagtgaagactttagcatttgatcttttccatatgaagatccctcttagtgtcagcaagatttgggcatgatcagtgtgtgtttgtaatgtaattttatggtttaataatagcaattcgatatactatgttttagctctgtgctcccgtgaaatagttcaaggaggctcacttcctttggaaaataacttacttgcttctgtaggtgaatctttaatattgtgttaatgtgcacagttggtgtatgtatttgtggaaatgaaaaatgtgaaatatgaataaccccattgtttgtccacagtctgttcacatgggcctcatggagtaaaacagaaaaccaaaagtatgagtgggcaggggtcaccttagtacatctataccaagtgcacgcaaggtccgttcctgtgcaatgtatcacaagatcagagaaatctatttctctgatctcccacctaaaacaattctggaaggaaatgaccttggctgacattctccttgtaaaagcttatctgtctgaaaatctgataagggccatagtgcccaacgctggggaaaatagtgtgttcatggagtcaacaccattgaayggtactcygccattactaaccacagtttctttgggagaagcgtggggagtgttcagtaaagacaacacagaagtaaaattccatcactcaagccatggcgtgcaagcacagagccaatgtggaagcacatttgccaagcagtgataatgtttgcattagaagatggtgttaaagatgatttttgaactatgttatttcttacagcatttctccgaaaattgctgtcaacttgtctagagccctctcgtctccatgtctttgaaaaggaccacatttgatcttctaacttggagtcctaacaggtctgcttggcagctgggataggacccccggtccatgcatcgtttttctgtgatgatctctgcattgaggagttctgcttcccttcccactcaccctgtccctccttgggacctctgcgttctgggccaggccttgggaggattccgctctgtcctccttccatgtctggtctggatgccagactaaatgtcagtagatttcagtaaaggctcagcgttgatgataatgcatgagctcataacattttataaccagtggaaccrtaaaccatttataaacatgaaatcctattgatttagagaaccattaatcctagacaaattttgacattttggaaagacagaaacagccaagctatattatctggagttttaaaacaagttcaggacccatctaatgggccatttcatgttttaaatccactgttccatttttctcattgtcagtgactctaatattactcaaaaaattaaaaaaaaaaattgccagagaagtttatggctagtgacctcctgctcccaaaacaagttatccttttcccttttttcgaagagcctctttgagttatgctctaatttataggaagtagaataaaatctcatgaatttaagtcttgctaatccagactacgtgatgatggaggcatagtctcttctaaggacagttgtgaaaagtgcagtctaaggctgtgctgcattaatgaaatccgggcctcagttccgtgatgtggtgcactagaaggacatggggtttccaccctgcctcttccacctgatgctggtttgggagtcgggggctccttaaacttcaattctttcacttcaagggggagaaaatagttccttcccaggctgtcgtaattactgaattgtggtgacaatctctccccactgaaaaatgcccatgaacgagcctcctaaactgtaagatgcaatttaaatattattgtaccattattatctattgatcactaatcttataatggaaacaagagctaagtaataaagatatctattagggatctcttcaacttggacatttaacaaggaaaacaagagcctgtcaatcgagtctgtgaatatacggtatgttaggtatagaagcgtaattctaccaaggtgctttggtaatattgaaggtgtgttctccagatcgtaaccgtttcaacagccccagattggttttgggttattagaacagagagaaggcgctagcatctcctaggctaacagtacaatttcggctacctgtaattattgaattcccattaagcaactacactgggaatcctgttattaaccaatttatcacaccaaggaaccatgtaatcacagagtaatctaatctgagttcttgttaacaaaatgactcgactttatctgtcgagttgattcctgtttgcactccccattatgctgccctgggaatctgcaaccagaggcaggttcyttggtagagggcacttatgagtctgtgagtgcccacttggaaacgcctgccagcaagttgaccctgaggtccgccccccagcccatctccccatctgtcacatgtgagttgcagtggatctgcstgtgggatgacgcccgtgcaccagccaggcaacgtgtgcagaggtgtgaaggaataatgtgcattgttctggacactgcttcctgctcaaggacttttcttggggaagcacaccaagtctctsggttgagtttgacacaccragtctctgggttgagtttgacacaccgagtctctgggttgagwcygaagcagaaacctgactggaggaggcagcatcagaaggttaacggtctggccaactctggctgacatcgaacaaaggtccctttagtcttaatagctaaatggatcaaaaggcagcaacacctgctcttctggttagagtagtggacttggagaaaagctgccggtagatgttccagggcactgggactgccctgcacacagacctccctctgtatttgagacagcggcttgtycagatagtgcctgggggcctgcctggtggagggcccatggctcttgcttcagcttccccttcctgctgcccggcagacctgtggtgggagtgttggttgccctacctggggccacatctttgtccggtgctgccagcttcatgattatcactttctccccacctgaaacgcctttctgggctcatggcatggctggcattccttggcccactgtttctcaggtccacataacctccttgttgtctgaccaccttcccaaatgttgcccaatccatcctgtcttatttgtttttgcactaaccacagataattattcgttcccatattacttgccttcatcttcctaaatgcatcttctcgaatgcaggcaccataatcagagatgccatgcggtcatcctctttctgtttccagcaactatagcaggggctgggtcctagcagttgcctacgtaatattgctagaattaatgaatgagaacagagtcttaaaaggcaaattctggccaggcacggtggctcatgcctgtaatcctagcactttgggaggccgaggtgggcggatcacttgagatcaggagttcaagaccagtctggccaacatggtgaaaccccatctgtactaaaaatataaagtttagctgggtgtgatggtgcatgtctgtaatcccagctactcgggaggtggaggttgcagtgagttgagatcgtgccactgcactccaccctgggtgacagagtgagactttgtctttaaaacaaaaaaaaaaaaaaagcaaattctacctcacttttagtcccagttgccctggactgctttgttttggccaaaaattatgttgtgtcctcccctgtgtcctcccacaatgagaccccttccttgccacagacaaatagggctctgcctggaggcattgtcagaaccactccagatggagtctgtggcctggttctattctatcagaacttatcgaagatcctgaaacattttctgcaagacatactccaggatctttttggagcctggctcccatgccacggtcccctcctttccgtcttctaggattctacagtaagatcttggatagaatgggtggggccagcagggtctgcttgtgagtgaccrgctaccacagtcgctgtgctaaggggagcgtgagagttactttgtccccttttcacttgcctgtggacagcaggtggaggtctagctggatgttttctgggtgatgtttgttctgagcaccatcacggtcccaggccaccagacgtgctgtgtgcacctgctttcccagggcggctccagtgcaggggctcattctacagccacacgggcacgtgggaagccggggctccaaaccttgttgtggtttctgaggactctggctgtggctttgcacagtccccttgcaacctcccaggcctcactctccagcagctcaggaggcaggaggctgcaggtggtgctgctgccctcctgctggagggatctggtgtttgtaaagcatgggcaggggagtgtccatgtcatgaggaattcttactcctggggaggagcagcagcctggaaaaagtcctgattcttgagattcaaagcatgagtctgaagcagctggagccaggccagccttacctgtgcggggtgttctgtcctataaacacctgagtcaaacacaggctgtagattttgctgggtgagaagggaagatccctggatggctggggatattgacaagacacgaattcctggggactgtagggatttacctttgtagccctctcgctgcctgcacctccattctccctccagataagggaaccatccacccaaacactctgtgccctggrgctgtgtcgccctcgctgtgctcttggcaagtccctgtgatgcatgattaaagcaactgagagtagatttaatttcttggttggtctttcccttttcaaaatgaaagttttaagtgtggggactttcttacaacatgattattctgtacatttccaaagaaagaagaatctgccctacatctcaggctgctctccagcctgcacctaagctttattttcttcccagagactgtgctaggctttgtagtaacacttctccccgctgccgcatgtgattttgcagagcggcatccttcttgcttctccagcttattctctgtttgtctcatgctcctataaatactcaggccctgccacagtttctttagcaagctgtcactgaatcctcaagataatttaagaggaacacatttttaaagttgccttctgcagtcgtccatgtgtaacagttaagagttaaaagcaggacaatctggtgccccggagcttgctttctggaagggaagaaaaccctttgtctttggggtctctagcctcgacagggccatgtggctcrgtggccagcaggtcagaggcctctgcctttaattctctttgaattagatctcagagtcttccccagtgctaaccgtggctctgtgctgactcaggctctaccactgtggataaatcacctcaccttggggacctgagcttgcttggctgtgaagtgatggctgagatgtgctcccacttctcacagcagtctcctggaacaaggcctgggcccaggagggcaggtgcaccaggatgtgggctggcttttattgtgtagctttggktaggaccagccatgtccccaaagcrcaacaatttatgtcaactgacattggcgccaacttggccggttttatgtgagtgccatgggcaacaccagcattgtccagaggaaactaaaagttgggatcyggatcccaggcctggctctcccccttgcatgggaggtgaattcaggcaagtcctttctgggccttggtttatggatgtgaccctggccacctckccaggcaatagaagaaccaggaccccaaatatttgttgttctcttctgaacacatctccgtgtgcatatctgaggggcactggaaatccagcatgtccagaaccagatctttcccccagcctgcatctctgtccttccagactcagcctgcagcccccattcatctccctggatgactgcagaccctggaatcaagctcaacttgctcctcctgcctcagcatccctgggtcgagtggatttaccctcagaacacccggtgtccttcctctccgcccaccttccactgctctagtccagaactccagcagtttcctccttggccattgaaacagcttagtctccctcactctctgtattctctccctctccagttaccagagtcaccttaggaaaactggcaaactccttctcaaatccctgcttatccttcaaaacctaggtcacacgtcactccttctttctgtggattttctagaataacaaagtccaccctcccccctgcctcatccacacacctctgggatgagttactgctctggcagcattgtctctaggtttccatgagagcctgtctcctgtgggatcgtagctgtcttcccccaggtctgtgaactcattgaaggatggaccatgtttaattcatcttttgtctgcagtgcatttagcacagtgctggctcygaacctgctctatttgtttgttgaattacaataaactgatgaactgaaccaaatcccctcacttctaatctcagcaaagtgctgccgccctattttctgttttcatttaaaatttatacatttgtataattctatttattctgtctatagaatttgttatatactatttctatattatatacctacattaaatatatatggatctcatcctaatagtttaaaatatcagtggtttgtagttaactrgcttttcaacactttaaayatagaaatgattcaccgtractttgtatccttcctttaccactattttacatggtaggtgcattaatcaatgtttatggtatcactgtagggcttcaaataccagaataaatggctaatccatgatagtaacactcaaactgtaagatctgtccccttttcctggtatactatgaacaagaaattatgattatagtttttttaaaaaagcattagccagatatcctagctgtatattttactatgaaggatccaaagttagagttagacgatgagctgagctttccaaatgcatcttggatgttttccgtgaccatactggagaacttgcttgactgaagctcatcctaggtgcccatcttacctgtggcactctctggagtgcacctgcggctctgggtcctgagcctcatctaggtgcctgggtctgagggcaggtcagatgcacaggggtcagagaacctggcatcccataaaatagtgccaccgaggagcagaggcagacccaagtcatttggattgcctctgcccatcgtaagttctccatgaggaaagacaccccatgactaacagcaccgccacatgtctatgaagcatatcttatgccatccccctaggaagccaggaagacgagtcatgataatcagaggagtcagtcctttctgagacgtagcctgcagaacactgctgttcctgacctcagtgaagaacagccagttttccaacttttgacagaaactgtgttataactgccttgaaaaggagatgacacagggctgttgtcctcctgttctaagctggttgctgtgagtccctcgtggccaacccaaccctgagtgggatcccatgacccagggccatcaccttgcctgcctgtctccttttgaagatgggagtgcgtctgtctagagacatgggtgacgtcccgggctcccagtgttggtgtgaaggctacaaagccaccctgcctccctgggccaccagcccggaaccctggtttctagatgtggtcaggagctcccactccatcstgatacccattgagagcatcatctccactaaaygtagcagtgatagttctcatcacacacggaaaccattagctgcttgtgtgtgtcatctggtgtcaccagtgaccggtctaaacgtcagcctgtgcattcctgcaggaggtcccttctcaaacaggttctttcaagacgcctatctgtgaggaagaacctgccctggggaccccgcaccctgaattccctagtcactctattccccatggaatttcatacgacccagccctagacatcgtggccaggactgcgtcccgtatttacccccagaaaaatctccatactcatctaaacatgaattatctttatcttcccatgaaactgacagcgtagtcccctcatgctgttttggacattggtaaatgcctccttaactttgaccttggggtataaccaaaggctgggactatcagtataattagcctttctctgctaataaattttaactaattgtttcacaaataatatgttgagatgggtaatcagttttagttacagttaatggctgtaacaagtttcctagcatctaaataagagaattaaggcattgctaaacattagtaaaaatgactaaacctaaatccgtacatattcgagggacataaataatatatttttggatttcaaatagaaaagaaaaaacttggattattagctttgggaattttcaagaagaatttagagatctgtcagaatcattcttttttcctgacttcattaaacaaaagtatttccttaccccagaataacattgtgtatgtaaggtgttatccagggattcctttctctcatcttcctaccctgtcactcaccataaatactaagaacagagcactaaacattaggcaaaaggcgaatttcccccacctcagttcatgctgctaaagaacttaatatgcacaagtggtggtcattgaagcagggctggaaagggcacttccatgaagagataatcgctgaatgacaaaggctgcagagactccactccaagtgggctccggacaggctggaattggcacggattctgcatacaaatgcaattaccactcttaacaataggtctccattagtcaggaggtgcccggttctgccggctgtcttgatcgtgcactatcctgaccagctttctttttgcaatacactcggaatcagtgaagtgccagtgtgcgtgattttatctagaactctttgcaccctctgttttgtggtcttattggtgttgtaatacattaccaagaatgatgtgagaaaatacaacccatcacttttgtgaattcttcattcagtctcataatgttagatattttcctcatctttcctgaaatcctccagtcatttggggaaggaacttgccttcttttggagcttcctacttgagaagccgtcaaggattgtggtggactgggatgttctccagcctgtctaagggggagtgttcacgggtcgcgaggtttcccatccatccttgggggtgccctggctgtttgtcctcctagttcctgccagttgttcctaacgccgtagcctggagggctctagagaggccatccaaatcctccctaacctggcctccctccacgattatcttgttttctttggagtctgctttgccaggtcgggcaccctggcttccttcacctcctcctcgcctgccttttacgtccttgcacctgtggctctcaccttccrtacagagggctctctctcgccagagctctgtccttaccctcatcccggggtcccagggtaaggggcatgcatggaggtgtcttcagcagcttcacactcctcccagtctcccagggcctggtgcagaacttgtccttaggaggtcccttgaaaaacacctgttcaattaataccctttaggaccccaaatggaaagggctaaggcatttttatcaaagtggttgtttaaaattccacctgtccttgtctgggcacggtggctcatgcctgtaatcctagcactttgggaagtcgaggcgggtggatcatgaggtcaggagtttgagaacagcctggccaatatggtgaaaccccatctctactaaaaatacaaaaattagccaggattggcggtgcgcgcacgtagtcccagctactcgggaggctgaggcagaagaattgcttcaacccaggaggaggagggtgcagtgagccgagattgcaccactgcactccagcctgggcaacagagtgagactctgtctcaaaaaaaaaaaaaaaaaaaaaaaaaaaattccacctgtccttgaccatcatggatcatatcaaacagtgaaagcatggagtacacagcaatgcgtttcacaagctccccctctctgatgtcagacaagtggtgtggagccttgtggcgttcccatccagtcaggttccaagcccactcattgatccactgcagaattattagtgtcacttgaggccactttgtgtggtggctgtgatgatccagaaatgaagcagacacagcgtgctccgggaggatgtggtcactcagggcttgcaactgatggtaggaattctaccacttgacgagaagattctaaattctgggagagatgctgtttaatgaatctgagtcagaattcctgttatgttttaaatcttgctttcatctccaaaagcccttggattgcagttggtccatgttattttcatgaaaatgtacacattagaattcaggccattttgtcgcagtactatgttacaaattaaccatttcagcgaaggagagaatggctggtttgccgatgatgtttcattgttcctttctgaaaccacatccgaacaaaagctgaatcatccgtggtgtgactcatcagattagtccgacaaaagaattaccaaaatagggctggagagaagaaatttcagctgcttatgagcaaagattatattagtaatttatccacaaaacattttctgaaataattacggcatattttgacaagaaatatggaagataagccagaaaagttttcctaaagaaaacggaaactggaatctcttttaatcttctttcatgctgagatggttttaattagagtagcacagtcggtctgcatcacaaccgaagggatgtctgtcatcttagaaaaagatgtagctgtgtcaaccatctcaaaatttgtcagaaagatcacgtttggtacttggggtttcagtggtctaggaggaagcccatcaatcctctgccgaagaagtgttactcagctctgagtcaatagatttgccaataagggagaggtgtttttcagctgaggaatgccttgtgactctccacacttttacccttctgtgcagtctcttgaaacccatagttacatcccttgcataattgtaaaaagcagctcctgggatttcagatctggaagggaccttgatgatcccttagtgcaaccccagaggacctggagactgaacagacaccccacccaagagagagggcagagaagctcagccctaaccttgcaggtacgcggcaggctctcacgggctgatgtttctcacctttcgcttgtcgtactggtggttttccccccgccttgaaattgcatcaagaccgtttgtccttttgatgcttttccctagtcctctatatttccatgacagaattatttttcacagagaaatatgtaccgcctcccatggcaaaggtacccatttattacaggcctgtggtgctaaagccccaggcagccgggtcttgaacacagtatccttttcatctccctgggccaggcattactggaaacacggtggatagctatgctgctcggagagggtaattgggtttcgagtgaaaagyggtgtttaaatgcaagacaggcagggtcaaattcatttccctccagggcttttggccttccagaaagcagggtatgacaaattacaatgtgtgaacactggcagctgtgatggccccacgtgttctcaagcctctgggacaaccacagtcatgtgacattttaagatttattttgaaattcctttaagctacccaatcccggggtgttccaggcatcccatggtgcatatggagaagtgggttgtaatggtggtgtagggactcacaggaaagttcctgaactcccggattcaggtccttgcaactaagagccaggctttgatctgacagcaaggactgtaacctgagctatactttcccctgctgctggaattgtgtttctacagattcatatgcaggaattcaaggaggacttggctgtaagtttgcatgggagaacaagacatggatgtagatttgtaaagcctttgaaatttggagacaccctctggctcacttggagtctatacttccgagatgctgtggccacccatgtacactgctactgagtcacctgaataggtgactcctcctgcccaaggaactcactgggttctgaacacttttctaccgaagaaacttctattcttaagcttctgacatttgggggtgactcacagaactgaccgcaagctgcgaggtcatccagctcaatccccattgctcaccctcccctttctctttgctcagtgggaccctgagggaagtgacctgtccctgtgtatcagcaactctcagccaccagggcagaatcacacagaccagtgcttggtagtcagataggattacataagccctcttagctgatgtgctagattaaccatatggccctgtcctttcacgacataagtggtgcacccatgatgctgggacccttaactaactggcttctctgtctttgtcctgtgactctctgtccttacttctcaaggttcatgcttaccaagaggatgctagatttgttcctggacctgtttatacaattagtactcactattgaaatgatgtgattattgaatgtcatgcaaaccactgaggcatgagaagatagtcattgctgtggattcagtgctttggaaagagtggggtaccacaaaatattcaatgaaaaaggtagagacaggtcaagtatggattcagaaggattctgatctcagattctgccacaggactttgctccactttaaagacaggaaaattggtgtggctcatggcagatcatttgaaactgtagtgggggtgccacattcaaagaaaacgtctgggcctcacctctaaaggctgccctaacttgaaatcattcaaatgggagatttcaattcatgcrattcaaattaaaataacatgtttaagttaggtacrtgtcaattttttatgatttccccattgattgatttttcaattaatggaccagaagtgaactttcactccctttatcatctcttcctgcagacctcagaaaactcttatccaacataataaccaccttaagagtaatcgttaaactttaattatttccattataacatgatagggagtttaggaagcagcatttgatgagctatgttccacttggtagtcacagtgcagtctttatttgaatactagttcatttcttgagtttcacactagtttatttcattgacaggactcaatgaaataaagactttgggaggcagcaggagtccagccgaaatattactctgcagactgtcctgggaccaaaagccttccagtgtaacttctgtttgtagcagaagtttggctgttgtagggatgttttgtcattgtgaccactccaaagggagtgattttaaaaatcaggaaagaaagatctaaaactccactcttcctcaaacactacctcttctagaatgcctctcccatttataagggggtgacagtcgggtctgcaggctaccgagggccacatctctattcagtttctgaagatgccacccaaatcacccgtctgtaaaatcacatctgcagtaaaagttctcgatgagtagtcatgcattttccctgctcgtatgagataaccagagcgatcacagtgcctcgccctctacctagtgagtcttcctaagtcttggcaaattcctgtggtgcttggtcactcgcagttcttctagcaagtggaccagtggctgatgtattcggattcatgtagagtgatgtttgagccagttcaaaacagtgaccactcgagtmattcctgaaaggacagatttctgtccttcagagacttattcagtcacttttaatgtcactttttataggagtgaattctggatttagagctaagttcatttaaattatttcagttaggttaaacagtgttcacatatatatatwttttttttcgatcacccacagaatattacgtaggtttaggctgaacagctcattctctgaacctaccctggatgtcttgactcactgttgcttggttgcgttaaagacggtatgagctttagcttccaaactaacagaagctgaactctgagtacgtgccaggtcatctacactctgcacttcctaacgtactgatgttcacggagggtcattttatgtcagtgttacagccctttgttgttgattcaaaattctcttttgcaagatgagtggagtgaaaagtttcccattaagcaaacttctctgatctgttgctatcattgagtttctaatttggaggaattgttgaagaaaagacctgcatggatgcctcattttaacctcctcaytggcarttgccaagaacagtcagcagcttggcgtgccatgccaggctgctgcaggggcccctcctcccttcctgctgccaggaggccttaccagcttgtgtgtgcctcttacaacactctaaggtgggggtggtttcagtaaggtaggctttctcaacctcagcactattgacatttgggactggatagctcttggttgtggrggttgccctgtgcaggcagcataggatgtcagcagcattcctggcctctacctgctgcataaccggcagcagctcctcagttgtggcaactgaaaacgtctccttccagactttgcaaatggcccattggttcagaacctctgaggttaaggaatgtgctgatgtggccttcggtgcctatctctacctgtggtttcttctgcctcctcccagacaaggtctccaggtgacccagctttgcttttgcttttaaggaacctgggccctatctgggatgctctgtctggatcggaggcatggacggccaggtctaggctttcccttgggagagaaccctgatgggttgaagattgtgtagcctcaagcctctttgctctccccatgtctgtgttcttaatgcagaggacagtaactttgaataactttttagagggttttttggtttggtaattgttttttgataatttggtggatcactaaaattattctccagtctaaactttagaaaaagaacttactcataacatttctcaccgcttttatattttgtttgtgaaaaattacatttgcaaaaagaaaagaaaaaaggatagccatccttcygaaggttttgactayatcttaaaatcctaaattactgatgcargccaaacacagcttcttcctgttgggagtttctgctgtattcttgttgatgtcagtcatataaacaaacttcaaattaaaaaccacaaggaacagctgtaggggctctggagcagggattctgcccggagacaggcaggcagcacaatcctcgagagttcccaggaaatgaaattccacatttggtgtgagcagcccaggtctttccatggtattcctagcacatacggtgtgctttcaagcctttgatctataccctctgaagggcctatgttttacagcctttccagaacacagagcccagggctcacacctatcgattccaagggagcaagccatcaaacttataccaattcttgaaaccactaagatacatttgcaagataaatgggttcaagctctcctacatcccacggttctatacttggggtggggtatttagaggtagcttagaattacagtcaagtaaggtccttcactttttgtctgatagaatcatcccagcatggccccagatcgttcttgcatttgtgggtaaacatcatttgtcactcataataagaaagtgggaagaggagaatgttaacatacctatagataatacatgcactgttcctgcatgtgtcacaattagctgtgtcttgccccgtccgatatgaaagcctacaagataagaacaggagagcattacaagcggtggctgggggtcactggctttatagagcagatgcctcaaatcagatgccttcccaatgccaagctcatcatggtcatggaaattgattaatgcatgcttcccagtttgctcctgtctctgctttcgttgtacaaaaccaatgcaacacctacagctaagatgatatttaaattaaatttagaagtgaacataagctcctggatgaagtaaataatatgatttcgttataagcacagggaatgtgggatgtttcaatgcagatttatggtgttttaaagaaactttgaggaaaaaccaaccacatacacatatgctgactccatggcttatgtttgctctaccccacctgtcctgctacaactgggactggcaaagtgcggcctgcaggccaaatcccgccrgggcctggttttgtccagcaaactaagaatggattttacatttttaagcacttgaaaaaaaattgaaagcatataatatttgtgacacatggaaatgatccgaaattcaaatttcagtgtccatgaataaagtttttacttttgaaaataaaatggtgaaaatttttatgaaaatacctatttctagtatcctcaattttgcctcttggtctgcaaatccctgaacatttactctctggctctttagagaagaaaatgccaagccttatgttagaatgtcttactcccattgccataacttctgagttactttccctggctttattctctggtcagttctgtcagacccctgaggccgggcagattttggcctttgtaggggaggttgctaattctcccccctaattaaaaaattaataataatgaycttggggtctttctgtagtatattgttgaaggttgtataaacataaagggttgatgatgagaattttctggaccaggctggagttgccttggctgtttcttggtccagccacctaggaacagctggggagtgtttcatgccttcacagtttctcctattttatccagcctttcctctctgacatttttaacatgcagatgtgtattttctggrtattattttgtgtccaggcacagacatgataaccggaatgttaaatttgtggcaggagaaaagctcccatctgcattagcttataaacactctgggggcaaatttccacgtacagagctactcaccagagtaacagtgtgcacagaaggtcttctgtcaacattgctagtcagtactttttatcccctttgctgtgtaaacttctctgcatcatgggttttaaattgaaaataacttttgttttcctcattatattgtctgttacatcaacatttgacaaaaggattgtctgctacatgccgtgattgtctcagtgggcttgcaaaactcagacgtgacctcatggttmtgtgcagtttgttgatcaagtgaccatattctgctccaaagtgttgccaggcactttctgtgattcatcatatttcagccagaattggaattacagtatggctgtctctatcgtctttccatcatcacctcccacatgaggtgcctttggaaccccacagcaggccattccgttctcccgttggctttgtcaggagagagsgggatgaacagcctgtgccttatcccctccccttgttcctcaccagacacggtgattttgtagtccttacccctttcctcctcatggcaagccccaagaatgcattcctcctgcaccttcccacctggctccagatttgtccaccctatggcaaggctcttccacatgatgacatcacccttctcccttctctcttgccctatatagacttacagcctttctccatcagctaattctactggagctcggctctaagctcagtgctgaccaaggtcattttgcacagtgaagtcagtgccatccttgagctcaggtgctggcaatggcacggtccacgctgaatgtgttgttaaactgttggcttgggtggcagatgaggtactgctctactattgtgttgtgctagtgggtataagccagcagtcaggagaaagtacctagtacttgtctatatgtgctagtcatatccaaattttaggttcttacagtgggcgaaaccagggatatttacagttttctgaaggcactctttttgtgctcataggaaagtgtgaattctaagcttatagaaccttcctgccctaaacctcaggggaaatgtctatcaagcctcatcaacatcaacactccttccttgcccagtgtccaagtttcccagtgcctcrcttgcattagagccctgagccttctaattatgctagccccacttacagaggagcatacagtcacacttcaggtccaggatctcattattcttaggccccaggcttctgatgctccctgtcaccttgcttgtatgctggggctggtgttctgcaccacatgtaattggcagcttgggataggcaatgaacctgacaatgagaggacaaaggcttcaggcacctgaaatgtacaagaggaatcttccaggaccttggagtacttcagtaagaaattgcttttctgaatcttttcttctcttttctttacttttcttttctctttttcttcttcttcttcttcttcttcttttttttttttttttttttttgagaccgagtttcgctcttgttgcccaggctggagtgcaatgggcacaatctgggctcaccacaacctccgcctcctgggttcaagcgattctcytgcctcagcctaccgagtagctgggattacaggcatacgccaccactcccggctaattttgtatttttagtagagacggggtttctctatgttggtcaggctggtcttgaactcccaacctcaagtgatcttcccgcctcggcctcccaaagtgttgggattacaggcgtgtgccaccatgcctggcccgagatattgctcttctaaagcccttcctgaaaagactttactgcagtcactttgtagaaagcacatattcctccattacggtcagtaagcaaatagttattaagtacatactaagtgtgaaacatttttctggctctacaggagacatttgcgaataagatggagtccttgtcctcacaaagctcacagtggcgtgggagtggcagaagggcaacataaatgcataaatgagcgaacggttaatttttgatactgctgagtgttaaggaagtgttgtgaagcagtattttggtctagaatgaactctaaggaggtgacatttttagtgagacctggatggtaatgaaaaagcagtcagtcatctgttgacccagggttggatgttgcaaacacaaagaccgtcacgtgttaacatcctgcagtgggaatgatgttcctctgtttgcaagtcagaaaaaaaggccagtgctgctggaatagatgcagcaggtgagagwggggagagatgaggacatgtgtataaaatgagaggccctttgggcattattttaaattgaatgggaagccactatagtttttcttataggtggttgaatgacatggaaacacttcttgacttttactctcaatcctctccttctataacatcattttcactcaattttctttctcttgcttcttttatttacaacccagcccaattcaccaattcctgagaaatggtttggctgacgtttgttggtaagaaccaaaggagtcattgtgttttctttggagacatatctgtggtcattctttttttagctagttgaaaacagtgggtggtctgtcagtttctaaatatatgtatgtttctcccatgtgtgagaattatttttaggacttcattaccatgaaggtgaggttttgtttaagttttgtttgggatctttcttttgtttaaaggaatcagttgtttggagtccatgaatgtcagcaggagattaatttgtgaataaaatttaaagtgttgaccttgtcatgtggttaattcacaggcagctgccagcagctggtgtcaatcagggtatgcctgctaaaattttattaagcacgagagtgttctcaatagagggcttaaaactatgtaatccattgtgcttactgctttcataatccatctaattgtccttgaagcttccaagctgtagggtttggcttcactgataattttatggtcacattaataattgggctgcagcatctgaatatgttctccaaatagagatgaaacagataagttatttctacaggacagggaacacagagtgctgttatggaatttccctattttttccttctcaacttggaaacacatcagaaaacagtactttgaatgattctctatattgccattgccataaggaagaacaacctaaaaactttaaactgctagagcagattcttctccagtgacagtagggctggagatcttttgtagattagaagtttagagaggagaaagcttaggttattgatgtaaaacctgcagtggaagaacatttggatcacaaattataaattttctgtcttgcagattaattgctacctttgtaaagcactcttcccttttgctttgaggagcctgtattatatatacataggcttgtaactccatgcgtgatacaatacctggtaccttctgggcrttcagttaatgttgatgtagccaagtcatagagtccatatttgtattttcataagtccagaataacacacttacctatttaaagaattccaactgagtgtggacaaaaaccctgacaggtataaattgtgaaaagttctagtcttcatttttctccccatatgaactcctttgggtgctaatgataagcatgttcattgtaratatggattttgtggcattcactatgtatcgtcccatggcagttagttgtaagtattctcttaacaatgcatatagcttggaaaacatcgcattcagcaccagggacagtgttaaaagtccaaggagctctctttttttggtgcttttgttttctgttctgttgaccctctagcctcccatccttctagaactgggttttatcccagggaccaatttggggaccctggacctctccttgcttgatgccttttgaacactccttggtcaaggtaggcttgcctgttagaggagcctggacatgaactgttaatagggaagctataagaacatagactctgcgacagtgcatgaaagagaaggtgatgctctgttagaaacagaagggatctggacaagccaattctacaaggtggtttttgtggagtccagtttttgagtcatttacatttctgttttgtagtgaaccacctttcttcacaggactttgctctactttaaagaaaggaaaataaacttggcttacagaacacagcgtggagctctagtcagggctacctctctgtaatggcctggacctctcaggtttagctcagcatgcagttccccagtttctctagctaccttatacctttataataatcggctctaattcttcagttgttactatcagcaattcctgaatgtataaataaatatatatacttgtatacttacaagtatataacatacctgaatttttttgtgtgtaaatacacacacatacatacctttgtaaatttattttcaaaagtagtgacaattcggggcatgcaggtcttcagttaatcctttttggaccaatagcaaaagagggaatatatgcacctttgtatatttattttaaaaactggtgacaatttggggtatacgtgttttcagttattccttttacggaccgttggcaaaagagggcatcacgggtagacatttgaaaagaaacaaagaagggcaggcccatggcagagctggtgctgcagtttttgtgacrccactgcaggaatgataaaggaggagggtggctgccggcctcagcctgagagccgcaycatggccacgtcctgggtggcagggactccgaggagcagggcacgggagggctggacggcatctgctctttcatgctgacaccacagggagatctaagtcagcagggccctgggtgttaggaagggtgttgagaaatgtcagagaaagatcactgcaagctttcttcccggccacatatccaagctctgcttagtgtctccgagaccttgaagatggggcctgagaggcaggactaacaactytgaggcaatcataacaaaacatgaattgtttggttaaaaggtcaggaaagaaaaaaaaaaaaaagtctctcactgtgctgtcattagaagcaaagaccgagaaagtgacaagcatctcctagaggaatggttagcaagtggaaactaattttacagtacctaatagtaattacagtactagtattgggttattggattgatgtaaatgtgctgtttttactgccatagtctcacaacactgtttccttcataagatcttaaattctcaatggaaagttctcttctcacattcctgggtgactggatggggcatttgtgtgtgcctgktctggttgcagagttcagcagcatgctgtgggcccctccctggaagatgtgttcagtactcagtgcaggggagggcaagtgacccagttgttgatttgctgctcttttaaatgccttgttaattttcagccagttcagagcttctagcatgtcagggagcagcacgttggatagtgctgaaatcaaagcatgaccttctaagtgtggtcttcaaaatgttcattacatagggtatggcaattgtcacactgaatcaattcagaggctgtatcctaggtttacctgtatggaccttagctagagatggtggttgttgcagatataaaaaaggcatggtctctgctctcaaagaaaatgtttttgccgttaatttattctcttaagtttgatctctcttgttctttcagttttcttactggatgcaacaaccgtttttttcttctgcattcttacccaggtttgtgcactagctgtctcttctcgatractaagccatcatttatgtcagcatcttgaagggctttttcacttaatagtctcaaagtgacattaattagaggcataaaatgataccaccactattgctgggagaaattaagtttcaaaaagtagtaaaggcactgttttcagtgattccctcctatgtttgagagccactctgagcagtagatttggcttgtttctgaatctaaggtctcaccaggagtttgccagattatgccccggacatgtacttattttagatgtcagctgtttacagctaaagtggatttagacttcaccatatactcatggaaacgcaagtacattgtcttagcatttgagctgttaaatgctagaatttgagggaacagccaatttatggttgctaaaagaatatgaagttgattttcataaccaactcccaggatcaccccttcattagtcaaaggcggtactggcttttggtgatggtttgtctgttccctttttcccagtagctgataggacccatctgtcagccagcatccaacttgctgaagtgaggctgagcagttatgagatccttgctggccttggatctccaagtagacaaagtaagttgttagtggtaaaaactgaagttgcaatttgaagagcacaaattgtgaccctccatactggcaaggctgtttggagtactgcctctgttctcccctgcttttgggatgtcgaacaggggtgagtgttgacacctctccagctgcccggctgccaccttttgagagttctgctggagcagctgttctttacggatcctttggctggctctcccccactctcctcgcctctgctccatttcctctgccagaacacctgtcttgccatgttgtcatggcaggctaatctttctttgttcgccagtcacagaggagatggcaagaaagatctgtgggtacatggaatgatgaatgaaggaacaaatgaaaaaatataattgagaaggtgtctttgtctcagatctatgggggttggattgacccctgttccagagaaacttagcagctttttcctgacagttaagtaaaactctggaaaactgtctcccatgttttctgctcaggacgttgatgatgggacaggcagtgtctgtggtagagttactttaatataaccaccactcatgggtttcgagaacgttaatgcgatttgatattgtctgattggtttctcttttctccagctctttcgcctgcagatatatgtcaggtggtaaagctgatcccattagctctcagtattctccatttgtctagaatgtctttctggggaagggcaaatacttctttttcagacacccgtgtaatctccctgaatatgaacatgcattttctatagtgtttcttgtatacagttgtgtcccaattgattagtttaagggagatctatttttgtcatcccatgtgagaacttggaagtaatatatctctaagaacatgatagttagatctgatagcattctaatgctgaatctccatatagattaaaggattttgagggctaccctggcaacctcaacacaaattacttagcaatgatgtttggagcacagctaattcagaagttgagttgggtctgtcttcatcccatttctctttaccttactttttttccatkgtagggcaaagttctcagaatcacacacatcccattcccctaaagccaggaatcgagatttaaaccctggaaggatcacctgtacatgtaaactccatgtggtctcatttaacatgtcaggataattttcaacaagcctagttatttctacttagtgttctaatcatagacyttaatggactttgctacaaaggagccgacrtaacgagccggcctccccaggcctgccagtcccagttcatctggggcttgctgtgtgtcagcactgtgcatggcctgtgctggggaacagttgcttggaagaataaaacacaggtctcgcccccagacacttaaaatccagaagacctttgtttccaaaatgaaggaattcttgatgggttaaggaagcagagtcacagaaccctgaacagtagcactccttccatgggactgttctaacccgcatgcaaacctgcatccttggtccgggcccggcttctctcttccctccggggcagcacagcacatcctcagtgcagcactcccagcaccttgtttgtggctctcttgcagaccatgccactgtggaatctgatgatcagatgcactttctctgtcctatgggactgggcattttgctggctgggaacatgtctttgttcctcttcacaatcctagctgatagcttggtgacttctgcagatcggggcttgaggtgcatcagcaatgcctggtcctttcatgcccagtgaaagtcagtttccttcccacctctccctccctccctgcttgagacttctccgccacatttatcgccatggagtataccgggagctgtagctatttcgctttccctgtctccctccacgagaaggtcaacacaatgtgggcagaggtttttgtctgttcccgggcgggcaaactttcagtgcccacctcagggccagaagtagagtagatgactgagaaatatcttttgaataatgcttgagtgaatgaatgaatgagtgaatgaatgaggagtctgtgtgagtgcccttttgggtgaactgataacatgcccttttgcttctgaaagggaaaataggactytcacaattttgtgatgcgtctgtctaaatagtattcatattagcccattttaaatttcctcaaacaagtagaaaaaagatcagtcgtcttctgcttccgacacccagttttgaaaataaatagcttagtcttgcacctaaaccaggcccacttccgtgtctggataaagccttcctttttttttttttttttttgccctgaagcaatcctggtggacgtgttccaggaagaaacacccttaatgaactcagtggctttctttcgatggtgtggacaaattaacttttattggcctcgcagctccccagatgtggtgacactataattctggggaggctctggctgttagggaagttttaatgcttgttttcattatcaagaattaaagggtaacaatgctggtggatcgtggcaaagcatcacagttagcagggagattccaacctgggtggcgtcccaggggacgcaggggtcagccgggctccctctcctctctttctcccttggccctttgtcttccctgtcatttgcctccttttttttttttttttttttttttttttttttttgagacagagtcctgctctgtcacccaggctggagtgcagaggtgcgatctgggctcactgcaaactccacctcccaggttcaagtgattctcctccctcagcctcttgagcagctgagattacaggtgcccgccaccacaccccactaatttttgtatttttgtagacacgggatttcaccatgttggccaggctggtctcaaactcctgacctcaggtgatccacccgcctcggcctcccagagtgttgggattacaggcgtgagccactgctcccggccctgcctccttgtttttgttgctcctctctgtagccctgtcccagcaacttgtatgcttcctttttcacagagccatcatgcatgatgaagaaaatggaatgcatcagtattttatagacattmttattgtcagaaatacatgcagatttggacagggacaaatacagagatgaacactattattaaggcaggactttttattttttagctttagtgccttttaatcatattttcataatataaaatcataacataaatatcaggaaagctagtaattattattttgtgtgtggactgcctggctatattataaacagggcaaagcttacattttccttccttcattcatgcagtcagggaaatactaagttgcaaaatgatgacaatgatacaaacaagtcatttggcccagaaggcaccaggagcagctattaataaggaaaacaactttttccagctgaggccgagttgattaacttattttcctggaggagagataaagcttaagctataatttattgaaaattaatgaaaatgaattttggtggcactggctatcaaactagaatgaaaataagaatgtgagtatactgtattaaaccaaattttccttcaggactcccatatttcttcagctcttgtactgtcacagaggttcgaatttgaaagcattaatgttgtcattttttgccagtggttctgatggtaaatatccacagagtcttttatctttaatttcttttgatgtgtgtttttagatcaagcttagttagcaatttttaatgagaacttatacatcttggagctttagtgctttgtttcaaaagcctgaccttgcatttgctttttaaacaaatgtctcagagctcttgttgccaaagactaaaatcttgaaattttggtgtgatcatttataaatttcttgatgtccagttatgagactttgctagggggataacctagtgctgtaaccaatgacatactgatagaaaaaactttactgcctttttggttgaaggatgctcgttgttagatcattttttcccccaggatctcaattttcatgaatgttctttccagcctatctttaaggtttatttttatattgcattgcaaacaatgcagtatcaaatgtttgttgttcacatggatgtggacatcaatatgaggaaggaagagccagacaggcatgtgacggtcctctgaaggaccactgatattacaaatggcctgtgaactgggttcccaggcaggttcctcaaggagagacgttgcatcctggcacccagatccctggacttaaagatcaatggccttgatttgtctgaaattacttcacagagaggattcctgttaatgattacagatccttcccaatacactttatttatgggaccctctcaatgaggggatctctgctgtctctagcaccggaaagatgctttctccaraagatgaattggcatgaaccctaccaggcctgggagggtaggagcttctgtagccttttcaagtaaaagggaaaatccagacttgcattascaaaaaaattaaaaaatttaaaaaatgcctgcattttcttatttatttatttattttctgagacrgagtctcgctctgtascgtaggctggagtgcaggggcacaatctcggctcactgcaagctctgcctcccgggctcactccattctcctgcctcagccccccaagtagctgggactacaggtgcctgccacyacgcccagctaattttttttatttttagtagagacagggtttcaccgtgttaggcaggatggtctcgatctcctgacctcgtgatccacccacctcggcctcccaaagtgctgggattacaggcgtgagccaccgcgcccggcccaaaaaaatgcctgcattttcattagttcatgttggttccccattttcaggggagagagaagatgagtgggccggtctgacagcccagatgtgaattctggcattaacatgtcttaccagctttttgaccttggagaaggtactgagcatatccaagctctagcttcctcatggagggcattcccaccttggattgttactctaaagattaaagaagataataccaaatggctggcacattgtaggtgcccaaaataggtgacctctgtaggtcatctgtatggggattctcatttcactagaacgctccctcagctccagtgggaaatagagctcaaaccatttttgcatagcttagcaggaattgcatggagtttttaaaattatttgaaaattagaacttgcatttcattttttttttaaatccaaattctgggacacaaatccataaattccataaatgttcatgccatgccttgaattgctcattttatctgcaaatgggctgtctggattgcctagtggctcggtggtgaggcttttattcacctaccaacttaaaaggctgaggaggtatttgaaatctattttggcattctgcacaggaagattatttaaattacattttcatgtatgtgtgatacctacatgaagcccaaagcaagaatttgaaatgtgttttatattctttcaaatatattttgctttatttttcatattagagatggaaagccttattattttttaagaacttaaaagtagtgtttacaaagttatataaatataagctataaaaaaggcttgctgtgaccctgtgaattaaatgaagaaaatgatagaaagaatatgaaatgtgcttcccatttcaaaatttcaaagaaatgataacttatatttggggtttcgaacttgaatattctattgcaaataaataaaagccattagtttcaacagaaaaagaaaagaaaatggcttccctgaaaacaattcaaaggattgcaaccttgcaggacagagaccaactctagcatttgtagtactgggagagataaggaattgatgaagtgtcaagaggaaaaagaaaacagaacagtgggatcattgcacacttttattgatggagatctgcagcgaggttyccccccgccccgaaacttttatgartattataaggcagtggctgaaattgtgatgttctcagacatctctatagaatatgttcttggagcagaaaggagcctctagggcctctcctctcatttggaccatgttcctttcatatcaaaaaatgtagctcagaggctaggccagggtgaactaaaacaaaatccaggtctcctgacgstacatcagctcccctgcccgtgacaccaaatgaactggtcctgtccttttctctggaaaccaccaagacaaagcttcatgtctccatttagtgatcctcaccaccaccccccatccccaaaatacaccaccctgtaaaataaagcaagaaaatctcttccctgtgttcaagctcctcccctggcttcacctccctgaatcttagcacttggagggttgcttcccagtagcaaagtaacctcaaaggtagtaacttactgagtgcaaacatagcctgaggactgagaccctctttgtccataattcatttcatctccaagagaagcccaagaggcaggtattctcagctgtttgttacagagaaaagctgaggtccagaggggttaataagcctgtgcacgcaggtcaggagagggaaggtcagcatctcaggacctgcagagtggagagcctggtcaccccaccctatccctctcctgaatctcactctggaaaaatggaagaaccaagtgcatgggaggctgacctcagccagctggctggaatgatttaaaatgttttgggttatgataaatgtggagagagacatcgaaactgatttatcaagaatattagaaaatgaagtgctgacatttccatgccattcaaatagggagtgctaaggcacaggagagcatttggcagcaacaacctttttgcttctgatctcagctcagcgctgctttctctctgctgctcacaatgccctgcttttctgtgatgcatctggccagagccagggaacacggcactcagtattccagagaagagccacaagatcattttcaggactgcagaggctgttgagagactgtctaatgtcacccacctcctctcctcaaaattgggccattctcagctaaccaggtggaagactttgatctctattaagtgggtaggttttggcaagaacaacctaatcatcctgctagagagtgcatagccaaattgggatgggatcacctcactgtgcccagctttccccttggctcttggaggggtgagcctgggaagccaggaaatcagactctaagcccacaccttcgtgattcctcagcgtttatgcacagctgctgcagcggtgcacaattttccatgtgggttctttctgctctgtaacttaaatartccccttatgcttcctctgtaattgtgatgcagtatttattctgtttgggcattggtaattagagcaaattcagagatttcttatcccctgacaggtctctctgattctgagtgatttgtcaatatgaggacataagatacagcaagtatatcatttctacccatctagcatcaatattctaggttaacgcaagtcacatcacgcaaacatgttctgtgatggctttttattyctgctgctgggagaatgagacctttttcatgtttccaagagatgctgtcatatacattatacatacatattaggtatatgtgtgtcatacacacacagagttccaaagcaggaccccaggttgtatgggctgatgaacaattaagcgtatatttgaacagcctgaatgccgatgaactgtgaacccctcaaaggctgggcccgaattcctttgactctcacatcccctcattgcctggcacagtgtccatcacttcagtgatgtttggcagaaaccttctaaatgtgtgaatgaatgataggccggtgtgcttggcagtcacacaccttggactgcctgcacccatattctggcctgaacatttttagctgtatgaatatggtcactgtatttacaaaccatatatcaggagtccataacctatggcttgtggcccaaatctggctaccacctgtttttgtaaataaagttttattggaacacaagtatgcccattcatacagattctctgtgggtgctttcaggatacaatggcagagttgaatcattgtgacaaagactggctgtcaatatgtatttactatttggccctttgcagaaaagtttgctgacctctgccatgtaggagctgaccctgagcccctgcagtaaacacagatgtccatgagactaagtccttacctcttaagtatgtgtatgtgcacatgaccttccattacttgttggctattcattgtttttggtaaagttgagcaaaccttggtacaggataccacacttcgtctgtattaactcgttccatccctcagctctttcttcctctctcccttgtcttgaacaccaccgtaagcggcaccctcacagagcccctgaactcagggggttcctttagcttctttttttaccactgtgtgcccgagacttgggagagctggcctcacaccaccaagaaaccaccctttctcaatgaggatgaacagaacccctgctgacagggaactgcccccatgatggggtggcagggatgatgggaggtgataaatgactgggtttgccacccttcctgcaaggtactagactctttgggttggtgtgttacttaggattttctgtttttaatcatactcttgcctttgctctgaattagtaaagtcacaaagccccgaagcctcagggtcttatcactacctgctggtcatgtttaagggcctggggtcctcttgctctctccccctaccccaagcctgcaggtaacacccagcaaatgctgagggaggcctggcccatagaagaatctgcttcactctgggcagtgacagattctgatcatgtgcttgatatcctcaagtaaagcttctcacgatcatttctggtcttctccaaatagcagagtatcattaggctgtcaccagccaatggacacttcaagagactaaatgtttggcgtaggaaatctaagaggcaaagagcgctgtcggggttgccacactgtagttgctggtgagtttacccaatgagccaccaagacctacaccccattggtctgaggatctcctgcccaggaatcccatagctgctacagtgaattagcactgttstaataattgattgggttttttaaatccactgtcccatttgccttgttcttagccttcaatgactcccattagtgacttatttaggtagcctgtgtgaccctgaacttccccagaagacacaagcataatactaagagctctgaaataagcaggataattcttggcattcatgcaagcccgcactgcataaagcagagtgattttagtgaattgccccagtgttttacaagggactaaaaggcgtgattttgcatactttttgcacatctaacctacttgcagaattcatcccactgaaatgctcgtaacaggatatgtcctttattcagcgccaactgtgtgctggttataagtgggagctttgyagatactgtatttcagtgtctaccacccctagttgatttcagacaaaattgaagctcacagaggttaacctgtctcagccataaacattctctgccgaagccatttggaaatctacataagcaaatgaaaataatgaaggagagtctcttacgaaaaataatttggaagctactgagagcggttgtagccagtgacacagaaattcctgcacaggttaagaactacagggaagcacttgcctgacaaactcaatagtgaaaagaagtcctattaaagagattttacaataaacatgttctaagaaacatacattgcccagggccatcagcgggattcaaagaatactggcttcccaaggagcaggcccatgacccctttgggccaggtcagaccttaagtatagtgtggaaatgtgggggcaagatttgtcacttgyattcaaactsatgggctccgaggtgcctgccctcactaggactcttctgaatgcagatgaaattctgttggaagcccctgtatgctttattggggtggcaagtggggagaggaactgactttccccagcttcaagagtgttctccagctcctgatttgtaggctttagaatattttccaagaaaagttccattgattttatttttatttttttgagatggagtctcgctctgttgcccaggctggagtgcagtggtgtgatcttggcccactgcaacctccacctcccgggttcaagcaattctcctgcctcagcctctggaggagctaggattacaggtgcccgccaccacgcccgactaatgtttgtattttttagtagagacgggatttcaccatgttggccagactggtctcaaactcctgacctcaagtgatccactcgccttggcctcccaaagtgctgggattacaggcatgatccaccgtgcccggcctccactgatattttaacttggtcatttgagttcattgtcgtatcatataataactatgtatcagtgtacacagagtgcattttcctgttttctttttttgtttgtttgtttttttaaaccatgagatgcaactaaaataccarcttcccagttcagatctggtacataaagtaagccctgtgaatccctcgttctaaagtcctagaacttgcccttcaagggattggttgggtgctgagtggagcagagtgttacatttttaggatttcatgagattgaaattggccacggtagcagtatttacaccatggaaatcagcagatgctacttcccttccctccagagcctgttgttccagatgtcccagcccagtgctggctgccactgctcacagctgtcactcctgggactctgtgctgtacccagggtctgggaagggatggagaatgagcttgcatcttatctgcctgtctctgaggctgcagtcctctcctatgttctgacatggagaagacgggtgggaaatttgaatttcagccaaattaatgaccctggggcattgagcaagagggggccccataaggtggccttgaattttggagcccataaggtggcacttgattctttgctatctgagtccagagggctctgagagagaggaagtgaatgttcccaggaacacaacagagacctgcctttctaccttccaccgtgagcttgtgctggcagcaactgaactaggattgattttaaagtaaaaccatcctttgtcttgatttaaggtgcccaagtcctcagatgcttaagaaccaggcactgtgccatgttctgggataccggagtgaatgacatttcgtgatgatggaaatgttccgtagctgcactgtcttatgtatgtggctatcgagcatttgaaatgtgactgctgtgactgtgaagtttcaattgtcattgagtttgaatttcaatagccaygtgcagctagtggccacygtattggatagagcagctccagagtttcagggacagtcttgtgtggcagcctgtgtgccgggcatataggggatgcattcatcacattggacgcccacaagaccactaagtcctccccagacccctgctccagcattgctggccagcaagatcaacactcatgccactagtggacatctacccattcagacacacctgccactaggctgaacacattagaaggtcaccccatgtcattccatcccctgtctgcaggacagacagtgatctcaacttacaggtgaagaaagaaggcacagagacatacagcccttgcccaagccctcagtgccagattcctacccagacatatcttagtaaactgagaaccacactgctagatggatggcatctcagagaaccctgaggatcttatttaaagcaatcttccatacttgttctaagaggagtgtaagaaggcgctcccatatatcgtacggttttcctttcttgtgttcgtgggtgttcagccctctcaggttcttctttgggcacacactcctgtgagtatgcacattagtgtacatatttcattttacaccatttggtgaactttatttcaccaaagatgttggcatctttctcttttgctgtctggtttaattcactaccaactatatcaacatcagtgactgggtcaatgtttgaccttttaatttttttgcaggaatgtggactactgatcagtaaatcactggtctcccccaccccacgcctgatgagtgttgcttttgsatctgtactgatggaaatgggatgaaaatggagatgtaaacccaagaytgaacaaggccttttggaaatgttatatggtgttagattacctatgaatctactgttaagatttttgtacatttggctggcagttctttttgcttaagagcatcaagctgtagacaggcctcctgcaccaagctggagcagccagagcccagggcaggacctgccccagcctctccactgctggagctgggcctttcacctcagcctccaccttaaggcaggaggtgtttcctccccattctttgcagtcagcaaactgtctaactcagccacagcaatcctcttaaggaaactttgtgcccaggtggttttctgtcctggaaatacattacttggcttatttcaggctggcttctagcttgctaaacccagggctcagggctcgcagagtgaagggtgcacatcacatgaggcaacagggcgctgcctccgatgttacctccagtacacaggctagcaggaacacagacactttcaaggggcaatgggcaagagaggtctcggcaatccaggcgaagtccgataacccccagacccagagtagaacaggctgctttgtatcagctgagcacatgccggcctgtaggaggcttccgcactggggagctcaagaactaaaaccccacctttaggtcatttgtttttaaagatgctgctgcacagtttaaacttcaaaacatgaagtgcaagatggtcttatcaacgcaataaagtaytggccgtgaagttagtatcattctttctgcagccccactggacacatagggcagcccgtggggaagggcatctgtctcctaatcatatacagtcaggactggtctcacaatgcccattgcttctttgggttccaggtacagaatggaaaacacactgtctatgatgtaaagccttgtacagtcctgaataccaatattatttcaattatttrttataagcaagtcagcatttacttttccaaatgtcacatgaaatttcctttctcttcctaatacgattcctaagaggcctgtggcctcttctcttcctgattctcttcttatttagaatagatattttggactggcatatgttgttatacattatcaatatcataaacctttagccctagcagaataaaaggaaaggtctatcaattcattctaagcataggtatggtttgaattcaaggccagaaagatgaacattaaccagaaagcgtatcgtgcaggatgcagtgacgtctagtatcataaaataatctgcgaccccttggagctcgccacgcccttagactatgacctgtttacggaaatgctggctttagtctcattacagacttgggtttggggctacagatggactctgtggtgatcagcctgcatagcttcctaagacatgggtgaacatacatacccttcccgatgggcctctcctttttccaactcctgaatgacccccaagagcactttgatggtttcttggcttgaactgatcaagttctccatcatctgaagttgtgctttgaggtcgaccacttccgtatgaggcacgattcgttggcattcttcacctgcagcaaccgcygtgggactaggctggttccccagccccggcggggtgtgagtctgcgacggctgctcactacattcgggggacaggcactgcatcgggggtgagcaggccagggcagtttccgagggcgcctggagcccgttgagatgtgtggctctcctccgctcgtcatctgccgggcagagtgaccactggctggcggctgcagagtctgacaaaccaggctcgggggccctggcactgagggcaggtgcgtaaacggtggcaacctccgttttaaacaccctcctgagggcaggtggagcgggctcctcggagtttggcctcccccggtcctgcttggccctcccragcagctggtaatcgggctcttcggatggaggccgagtggagttttggagcgcagcttctccatagctgagcggctccgggcttttacagggctctgtgcagttgacccccaaaggctggtccactgtgttcatgtgttggttggaatggaaaaccaaggctgtggtcttgtgcacccgccccgcgccacatggccgggcctcctccatgggtccagcctcgttcttctctttcrcatctgttagaaacccattgttttggcttttaaagggatctgcagctgggaggcttttgaggttcccctttttgcggtccagagggaacgtctggtaacacttcttaaggtcgggcgaggtctgcacgcctgtgctcttggtgacgttggggatggacctgcgtgcgggcactgtcatgtatttgcggtaggctgctctgcaggacacgggcttggcctcccgcttctcccccagctggcccgaggacagctgtgtgtccctctgctcattctgtgcctcgcagatatccttaaaccgcacctgcagggctttgttccgttttttaatctgccggttggggtccagggcgtatttcatctccagggccaggcaggcggcgggttccacttcactctccgaygttgtgagtatgcatttgccggtgtccttactgaccatggttcctgcattcagaaacagcaacagaggtgtcagtgggacagaaatacacaytcragcaccggccgcacaaacttttagccaccacgacgactgcctgtttcctaattatatttaagcaggtgaggtcggcctttatgttaaggaaaatcacacgggctgagagtcgctggcagcacagcttgaaatgcttctcagatattaaagcctgcttgcttttccaggtgggatacactcgctttccttttgacagtaatgcatgtttccccattagacaaacctgttttactacattcatcaagaaacccaatgatgctgcctcttctgctttgcaaattatcttttcacacgcgtgactccccttcttaggcagatggtttaccaagtgctacttatttggtttgcgttttgactattttttgaggatgacgtcattaatctattgctggaatctgggagagctgctgttttaaagacttactggagctgccacgtctcgagcagataaatgtggagagccctccgaggaggaacggaaagaaatctatttgcgtgagccgttatggattccgggggagagttggccgtgctcctggrtgggaaccgtgaaggagaagtcgtcgaggggtggtcgcttctcatgggttaacatcagctctaaaaggaacgtgggtttccctgcatctacaaaggccatgtttgcaactccttttattccatggagagtggtactggaaaataattcttaaaaaaaaaaataaaagaaattactcattctagaatcaagttttgtgttgtgatcacaacctccgaaaatgaaaacaatggtggtggtttcagtacttaaattctgaaagcaaataaaactatgaggctttatgttaatcatgcaaattcatcctgggctgaattattaaatgcagctaaaaagatgcaggtggccaatgactcctctcggggaataccagtggggtaaaatgccttcactttattaggcggattcacagctgtttattgcacatggaagaacttatttgatggctgcgcttaaagcaagaaaatagagttaagtgtgttgtttgtgagtgaggcttcgccttttccccccttgtgtttgagaagaaaacagtcaaacggaaggcactgagggtgtacggggcccgagtggctggagctgagtgcccagagaggcaaggtcatggacatgggcccgtgagagctgcacagaaacagacttcgtccacattgcccccagcccagctgccgaccttgtgccctgtcctgggggtgtctgaaaaaccagcccagagacctgtggcagcactcattggaaaatgccacaagaactatgacatgcgcagcatggccactgcttctggagtgaggtggttcgagtgccagatgctctgctcgttcacatacagaatgccttgcttacaaatgttcctgaaggtcaaggctacacttcccatttcaaggaggatactagggttcagagatgttgcgtcatttttcggtgtcacacaggaaataagcagcgcaggcaggagcaggaccctactttagtggaccgctgaatccatgctgttctcatagacccagctgtccaacagacagaggcatgacccctccccacatccttagcccttactgagttagcatgacaggccgaggtgcacggtggttccataagggggaagaagagacaacttcacagccaccatctaaaagtaagtgacatgactagccctctattaaaatgacctctatgtctcagrccagcctggtcttgtcaccttgctggcctccactgctgttcactggatgaaagagtgaaggaatcaaattcttcatacattatgctatgaacaactaacaggtaatcatgtgtaagaacaacaaaaaacaatctctgcagcatttgatttaggtgggaccagagtttctaaatcctggcactactggtatttcaggatggatcatttgctgttggaggggctttgctgtgcggtgcagggtggtcagcagtccctggcttctccccactgaagaagtagcaccgctccctcccagtgtgacaactagaaatgtctccagccattaccagatgagcctgggagcagagtcttgcctggcagagaaccactgcattagcccttgcacctctggatgcctcgggctcttgttcgattatcctatagtgtgtcctgaaaggtgaggcttgcgtagacagcaaaggaagtccttggtgctttactaggtgctgggggtatttggagattgctgcaatttgaaacttgaaaaactgggcagttttagagaggagagaaaaggcaagaaacagactggagatgcaccaatatcttggccccgtttgggatggctagatgataggtggaaggagggacaaggcgtgcctgctcaggagaaagcatcgatggcttttagagattcttatcccagcaggttaaacagatgcacacaagacagcttggtgtgggggacagtatgggtagcagtgggggtggaataagaaaattaaatcttaaccttcactctgatctcctattcattctttaactgcctttgttgtccaggtatgtcagaatgtattgtgccatcattctgcagaagaccttcatactagggaaaatttgaaagagagagcatttttacaaaaagcaatttactagtaatttatcagccttttccctgctacttctgaaaaatgtgtgtctgaataagtttgtcctgccatgctattcatcatcaccatttgctagggactgcactgaaataattttcttacatcagttggctggggtaagaaatattctaggtcttggacgcaaccatcaaactaatacaacaaatcagaagaattaattgctggtggccaaataataataaaaaattctaagctcttctctgttttatagagggttgctggtacataaaaatcatttcgttgttagtaaaaaaatgatggtaatacttaggatttttaatcactttagtttgttattgctgacttaaaaaacagtaatagtaattgagttcttattctctgatagggaaaacaccaaggaatttttgtggctggtttattttggcttcaaatgaggttatgagttctttctgacggctggatgacattttctaaagctttaaaattgaatttctggacattaagaattactaaggtggacacatcttttcggggtgttcatttgctctttattgggggtggagggtaaggcttacagtgattaccattaagaaaatgattttgttatgaaaggaaatggggcattctacagaggactttccctaagacaagtggaaccttctcccacactatttcattcatcattccttcatgcatttattcagcaagtgaatgtacatacgttacagtgtagcattaacattcagtaagcatgcagttaagtgctcctatgtgctaatcaaatgtcaccattcccctatgcatagcagttgtgttttctagatttgatcctcatcatatccttacaaggcagccactattgataccctcatactgcagattgagaaaccgaggcacacgattttsggattttttgcaacttgctcagagtgaggaggctagtgggccacacccattgaaacagctgaatccgtttgaatcacatgccctaacccactayccctgctcaaggaactctgtaacttgaagtgatccatgataaacttgaaaacatcaaacaactgaaactcatctgagcaatgcccttgtcttgttcccacagtgtatctgggtgctggttaggcaaggacatccaggtagttccggtaacacagtgggtgttggagcactgagtgaatgttgccttgaattctggactgagcatgaagctgcaataggattcttcatgatggcttgccttggctgggtcaccctagagaaccatggactctggtttggggagctgatctcttggctctaaagcagcaggagttcataaagtttatttttcgtaagaaaattgtgttttagaattcattggactgtgctgtcttgaggtgaaaatggctagtcatggttgtgcctgtttggctcgagagagctagatgtcgaggagctgtttggaatataaatgtcttaattaccctcaaattaaatttcataatcaaagtgagctgtaaatacataaaccctgcatttttagattagtgacggagaaccatctctgcatgctgctttaaattaatggctgatatgaaaatgtgcattccaacttaaataagtgaaaaatggaagcaacttaatggctaacaataggtaaacagttaagtaaattatggtttacattcactctgggcggccattaaaaggataattatagagattatttagtatcatagaaaaacacgaaataatgttaagtgaaacaaagcagtctacarattatactggaaaaaaatgaacaaaaacggtcatcgttgtggtattaagatagcacattcggagagatttatttttccttctgttttccaatttggggagaatggagggaggtacagcgtcgttctggttttgccaatgaaaataacacaaggtaaaatctaatccacacctgaagcaggcctctggaaggcataaccactagtatcagaataagaaaaacccagaaatgatgagatggggctataagtartttgtcaaaggtcatcttttattgttttgagggagccctgataaagaatgaaaatgaatttcaagtgtgtatatgtatgtatatatgcataggtatatacgtgcctgcgtatgtatttggctatgtatagttaaatgtttagcagaagatatgtcaatatttgagcaaacgtactgtaaggaaggaagttagcatctgttttaattagaaataaaacagactcaatagtctgaaggcaattttgtggggttccattagctgccaagagaaactctccattggattctgtccattcttaaaatgtccgtgctgatttgcaggtttgcagtttgaccctgtgatgggatttgtgggggaagatgcaggcagctgccagtctgaccgagacacctcccagggcccagcagtctccgcatatagtargatagctaggcaagcagtcagaggagtgccacaagggattgtatgaaattatgggttttcctagtggctttctcactgttcagacaccttggagtcaaagatgctggtggggattcaagatgaactgggtcagcattttcttccatatgccaagggggtgcctgaacatgaggctactcagaatgggagaatggtgaaaatgaacatcccattcttcaccaccggcttccaccggaaggggaggtaaaatagaacctcactcactaaatgaagtcactcacattgtgaaatagttaacttagagacctgtttcataggtgccaattgagtcttcagaactggaagtcctcttttccttggggcaaagccagctgccatagatggtggactgtgtcttagattcattatccggtttaattttctttatatagtgaaatgttattttttccctacatttgttgttttcagcagaggtcactgatgaggaccaaaaaggggtgactggatgaattcagacacccttgtgtgactgagcaatgcgtgaggaactgttttcttgcagaactatggctccttggaggaaacacggagatggcacgccccgttccctcgatgtgtagaatattgcagtgaaacctctgtcattaagaactgatgaccacctagtccaaagcagggaaaaggggcactcacagaggttaaatgtaggcatcgaggcagaagaaaacctatcttaggttcagcccccactcatgcatatctgcggttttagaaaacactcttaacgaacaaaaaaacctatggtcagttgctttagccacataatgtaaaccacaaaggctcacactggcctacttcggggagtgagaacaaaggagggcaagcatgcatgcttggggcttggtgcttggtgctcatgttttaaaagaaccagggaatggccctcttaaatggtccagacttttaatttatgtttcactacccagttctttgattttcagcttatgttgatgttaacctttgctcatcctgctacattcatagagatgaattaccaaaattttatgatgttggtgaaaatcaactggaaaatatgcctccttgaaatgagacattatgtcaatgtaaaaaaagttttatttgcagcagttagctatgccagctaataatggccaaaaggagttcagtacagttggttccaacaactcaccaaaatcacctgtgagattggtaaaaggaactaatttccctgcctccctgtttcccatcatcatgacagtgacagagtgtgagacaggagggctgtgctttgaacacagctcatgagtacctttagttacgatagcaggtgtcccactgaccctggaggcttcctggtgatgaagcaacaatcagctggtagtttggggcccatcagaggcgggagttggcaggacacagaagaggtggtctcccttttttagacttagtgggaatctcactcacatgaaaacacaaagatacatactagaatgtacttggggagtgctttgccttcctgattatgstgaatctttttttttttttttttttttttaactaaacagcatgttttgactcatgatttatctgaaactaaaactaggacattgattttttcccccctaaaaatgacttatatcaaaggagtctgttttccctgacacttcccagtcttatttgaggataccctattggracaatcagggcaggatatctgcttggaggtaatggtcactacaatggaagtcatttagagttgaagatgcagtctgtctttctggcaaggccatgggaatgcccatcaactcgaccatcagaatggatccctcttgtattttcatcgtagtatgaaaatgccacaatgtttctttggtttggccaaatcctaaactttgcatggtcttcggttcactgcagaggtagctgtgccaggaagaaaaggagacttgagcatttcttgtaatgagcttctattcctaagctgatagccaaatgtagagaaaataacctgcacttggggtccatgtacacaatcctaaccgaagtctgcagaaagagttagtgcttgtaatcttctcggccctcatacagtttgcagttcatggcctagtctgaaaagactgtcttggtttgaatgagctattcattgcaagtgtgcacagagcgaaattttagcattcataacacaaaatgtcatttttgttggggggctggtgaagagaaaataaacaaaaggtctatatattgtatacttgaaactgtatattttattccttaaaaatctacctcttatcaatcctggtgttactctgccaggttagttggttgtttaatttttcccttgaccagcagctgttgtgaacctctgtcttctctgtgcatgataataagtagctactttttaaaaacatgaaaccatatccttccctcacaaagtttcatctaatgtcttcgaaggtttatctctttgtgcatgaaaaacttggcagtgtctctggtaatctggaggaggaggactcagtggtctttcttgggaagcagtctgacatgatgtaatgcctgagacccaagggtggcctggactcaacccagcaacacagctactgtgcttaccccagctgagcttggagcaaaagacaccccatgttaaaggcaggactggacttggtttgcattggggtcacgagacccatctccaacttagtagattctgtcagtawttttatgctgaaggcttccaacaagtgctgccaacggcttgctcaattcattccccccccagtctaatcccccaaatcagtcgtcaccatgccctattcgtttttgtttttccttcctgttgcttctcctactgatttcttccctttagttccacactgttcccaccctgatcttggccttcataactctcctgccctcagctctccattcccccatgccccacccccgtcccccatcctgcaggtcctgctagtcttggcttcaagtgcacacgtcgcttctctgtgcatatacctggatacatcccagttggtagcacttccaaagagtctcttattataagatcatctatactttttcctacctgctcatctttctagatttctcttggctactcagaaatgctccatctgctgacttccattaagccatttcctgcactgtctcctgaacacaccatggtcagtctctactttgtgtcttcacttccactggttcattttccaggaccgcgccctggtcctccttcctcatggatagtctgtgtttggtggtctagatctagtcttatcttctatgccttctccagtccttacctgtcaccttcatttactcactgaacagtgcatgcctggggtgacctaggcaccatactggatgctgggcacacaggaaaaaacaaggcatactctttggcagtgtctagtccagcaggagagagacacgttgatgcctgacaccagtccactgtgcacaagaccatgtaagaggagggaagtactgagagtgctccctggggagtcagggtaggctctacctgggagrtgtgcaagagcaggcctgaaggatgctcactttgctttgctttgtgtcggttttctctccttaacacaaatataagtgttctgtggagtaggtccctctaagtcttcctcctatgctcagtcatccttctttacttactggtttaagaatcttaacactggccaggcacggtggctcatgcctgtaatcccagcactttgggaggctgaggtgggtggatcacaaggtcaggagatcaagaccatcctggccaacatggtgaatcccgtctctactaaaaatacaaaaattagctgggcgtggtgatgcgtgcctgtaatcccagctacttgggaggctgaggcaggagaatcgcttgaaccagggagtgggaggttgcagtgagccgagattgcaccactgcactccagcaagagaatcttaacactatacatcacagtatccttagagctgggaccttagctgagatacagcaagaagacttaggatgagtgtacaatattaatggcttccaaggagtctttttacattatctggatcctcacattaggtagaacctggctgtataatgaaacatgagtaggaattagagaagtggaaaggagaagggatagttttgttcgttgaggtaaaaccatatccagagatctttatcttctgaactttggcatgactaccttgagtggttgttgtacaaatgtttccggtgctgatgggagagaaggagatggcacacacactcacaaaaatgagtagatggcacagaaatggtacaggttctatatttaaccatgcagtatattggggccccatactgttgtagaaaatgtgacttgctaggaattatcagaaggtttgttcttatattactcaactttcttcttgggtactcccaagatatggtagtggcaaaataaattgagtttaatwaaaaaatctcaatagcttggaataacaacgttttagakcatggcacctttcctaaactcagttgtctaatctgctctagaggatgaatcactggctttcagagggaaaaaaacaatagagggtctggggcatacccagggttctagtgacttccaagggtgtattagtccattctcacactgctatgaagaaatgcctgagactgggttatttataaaggacaggtgtttaacggactctccgttctgcattgctggggaggcctcaagaaacttaaaatcatggcagaaggcaaaggagaagcaggcaccttcttcacaaggctgcaggactgaatgagcgcaagcaggggaaatgccagacactagacatggtggtgcgtgcctgtaatcccagctacttgggaggctctccttaacacatccgatagacaaccatcagatctcctgcgatttcactcacaatcatgataacagcatgggagaaaccscccccccgcccccccccatccagttacctccacccagttccacccttgacacatggggattatggagattacaattggaggtgagatttgggtggggacagagagccaaaccgtatcagaggggcataaacatatgaatgaaatagctttcattttcctgttctttagactgagaacaatgaatataaaattatactaaataaggaagcgcagtacttaggaatctcatgccacactgctgttgtccattgagatgaacgtggagaggaaggagaagggcaatggggatgtataaagagagagaggttgttaggggaacggtgagtcgagagaaatgcacagacaaacagacacatgcacacacagatacaggaggggaaggggatgtgtgctggaacataagtccaggtcagctgtgggacatctgtgggctgttccttgaatcaggcacatagagttttgatagccttcagccatgactcccagcgttttggttgctcttaaagggccagttgcagcaaccccatctcctgtccagaagggaacgtgacaattcaccccggggcaaaacaagagcccaggctcgggcaggcacccaaagcaggacatcatacagtttcctgttctatgaagcacccaacacataacacattaagtgttaaactcaatgaagagtcccattttcagcaaatattcctgcgtttgcctctatctttttatctctccagcacctccttggaacagatgccctgctactttacaaggcttgtggaaaagagaaagagaacagtagcaaaagcctgtgtagttcatgaatagaagttagcatcgtagtgagtaagcagtactgatgatctgtgaaatgattctctgtggacttgagcatgctaaaaagatcttgaaaaaggaaaacataaatctttccaaaacctcacatgacccctgtatgctttcgccttcttgaagctttggaggagagcataggtgtggatgaaatggagtcttttaaaagttgttttggtttttgtttttgtgtgtgggtttttaaagagagcatatcctgccacgtagaagaaaatccagggggtggctgtcctcctacaggaaggaggtaaacaagcatttttccttaagggctctattccctcagcctcgctccctcgaaggccacacttggaggccaggaagttaatccattaaaaaacaaggagaagaaagagagaaagaaagaaagaaagagagaaagagagaaagaaagaaaagagagagaaaagcaagcaagcaagcaagcaaaagcaaaagcatattggtctctaccccagtccaggtaaatcagaacttctggaggatggagactgggttccactgtttgttttaaatrcctaatataattttaataatgcacatacgataaagaaccactggccttcttcctttatctttttcaccctttgttgtcttctatttcctgctgtatctccaaagcttagagaagtttgtggcatacaaaaagtacccagaaatattgactgaacgaagggcttaatgaatgagtgaatgtcacgggggagcagggaggttgagccccttccatttttttctagaatgaacctggacatcagccaggtgttgggatgatcaccagcagatcccacacaggcccacagagtgtctgtgccctggcctggctgggctgtgctgtgcacaaacagatggggtggattcatgttccacagaggagagagctagtggccagttattgtcatggatgaaaatccaggtctttcacaacatccattaattatgggatggcaaattccaagtaaattgtcactgagcagacccatagtaggaatagggcatattcacacttttttttatgtatatatatttctggttggagacgcaaaacatttagaattctgttcccttctagaaattccatggcttggggcagctcttttcaaccatggatctggggtttgagaccagtcattcgtacattgacagtctttgcacagtgaataactctggaatttctgcattagagagggggtgctcaaggtcttcccatgctaccayggtttgctaacgtggttaatttctggccgtagtccttacgaactggggctttgagaccacctgcttggatttgagttctggcccttcccctccacttaatagcccagaactctgggcaagtgatctaacctgggagagcaaagatcagaaaaggtaacacttgtgtataacactcagcacaagctaggtaccgttctgtgctttgtgtatgtctgaacctttcattctccaaacaccctctgaaggagaaattactatttgtaataaagatggggaaacagaggcacaggtagtggagtcacatgccaaaggtcacacagatactggcagagccaggagggcaaaggaggacagcctggcctggagcctgttaccgcaccaccacgctgcactccactgtgagctgggtcagggctcaggtggtcggctcctaggaagcgctcagtacacagccctggtgatgaagtggatgtacacaaagacagcacaccttgggatgtgttgtgcatgtggatgacactggatgcaggacctacgagacacaagcttgagaatcaccaccagaaggttccaaccttgagtggctgattaaaaactgtacggttgtcttagacttatactttaaagctgcatttgctagtggtcactctcactgactcttcagatacagttagaactgatgcttccatgtggaattattttaaataattactaggagtgagttggggtccagtctctgccactcactcagtagttgacctgcccagtgcagtgtggggccaaccctgccagtgagcctgggcactctgtctgaggctccagtgtccagccacctgctaacttctgtcattcagcctcaccctgggtgtttttgscacatggacaaatgtgatagacacaataaataaagtagatatatattcagaataaatattatatagcaagactaaaatataaatagcaagtgcaaaacaaattaaatgaggatatgaatgacttcagtgaagccactgagctaacaactacctttaaaactaaaacagtaagtaattgagaaatgcagttatcattgggcaagaagtcaaatgaaaaatacggtttgaaagtgaacagcatattttcagcattcctttaagttcacacagtacgtttgcacatggcacattatctaagctatgggagtctcaagtgcacggttaagtggacactgtgcagtgtgatttacgcaaggaaaaaaagacaaaaataatctttatgcagcgctgtcattgatttttaaaatgataaattggtgggtctggcacagagatcaatggagttgaagtcacgacgtcaaattgagatgtgaggttarggctgagagacagacatctccttctctcatgctggcccgatgaactctccagtttttttggtgagctctggtgaaaactctttttaacccagaatgtcagcatttgggttataagaacattaatttatctgactgcagtgagatacattttctcaattctccttatttgcttcttttaccctaatactaggtcaccaaattcaaagacattctttctctaaaaactcaacttctacccaactgaattttcaccaaaggaatcgctgaggttgagtttggtggtaaagaacccaaccctttggtgcttttttcttttctaaacactgcatggccagacgtcagtactgttcagccctggaagccgtcttcctctttactgccttctcacggtgtttcctttaattcctgctacacaaaaagttacaagtggaaatggaagaaaacaattctttcccaatcaggattccctgagttggtagcaaaatcactggctaggtttgtgttagtagcctcattaaatatttattaagcacctgttatagatastactatgcttagtcatttaaggatttgcgctgtgaatcgcttcatccaatttcctcctatttcaaagtatttcttgtggacattctaggasgtaagagataatgaaaaacttattttttaaataatatttccagttgaaaattcacactcaaatatttaatagaaatcctatctycccccccccgttcctgctggctcccagatttctgttgccattaaaatcccccaccgccttgctggccttgggtagcatctttaatcccttctttctatcttgccacattacaaagacttgtctgccagaaggttttactcatagctgccccctaacttacttcccagtgctactgagactggcacattctcatctgtgacaccttctcaactggtctccaactcctctcctctggtttgcctctagttataccgccttaatcttctgagaatatatgttcttgtttcaaacatcaacagaggaccctcttgccctgctggttcctcctcaaactgactccagactatgcctccactctctgattccagcacctcaacctttgctgaatgtcacttctcactcttcccatacaagtctgtagccctgagcaccctaccacttggcttaagctccaggactaatgtctgctgggctcaggagtgcaatctcaagcatcacccacgaagtgagccggggcatcactctctgcctgtaatctcctatcctgattctacctgggagtctttaggctcctgccacttccttgccacctcctcccctcctcctggacttgagcttcttggagtcctctcacttggtcttgtaacaccttacacattgccttggccactgctgcaacagctcagtacatatccacaaatcagaagtcctctctgaacaaagccatctgcrtatccatctaccttccctatgcttgccccatttaaaaatcccaggttttatatctttgctgcattttttaaggatgctaaaatcacttactacaaaaataagcagatttcactgtacaaaatgcaggtagtaagaggtatctaaaatgtaaccactaagtacacatagaaaagatttttaaaaacatgaagaaggaccattgacaaatacaagatccttcctagagaagaacaagggtgggggatctcacatcaccagtggaatgacctagaaacacaaagactgctcaatttcattaaggttggcagtgaataggatatagccccatgctgcttcctcaactgaacagctgtaaaaaggccctcaygccatcagcctgtgctttttcctctttctctctgggatgtgcctgtccatggaacccctgctttgggatatagctgtgatcatctctgctgagatggagtgagagcaacttttatttgcaaggctgcctgtagtattttcagcattccgtagcctccttcccatgtctctcatatgttgtagtttactgcatttcatttcatggccaaagctagattattaagggctgaactggaattttccatattaagtagaatataaacttcaacaagcattttgatatggtggggttttcttttgtttctttaccattctattggatagaatagtataattcatatgaatgtatgctgtgcagagatgtaagactctcttcttttctttttttgctcaaacttcctaacagcaggatagtgtggtaaagagaacatgtctatggatgtgcaatactttgaataaacagttcagtgctctataaaataaatattcacaaataatgactttggggagagttatttccaaatccctttgaaatatgttgttagccaaaaggtttatagagtaatttagaatcataattcctgcttgtccctaatatctgctgttctacattcaagttaattttctctcagtcccaattagagctgggaatacatactcagcagaaagagacacatttgtcaggttagaatgttttgtttttattcaggtagtgatttgtcatctgataacatctttatacacctcaaagtccctcaacccattcattatggtttgaataatgtctaaagcacgtacgactcaaatgcacactgaatatcctgtgacttacagtagaggggtctctgaaaggacttgaatttggagccaggaaatgtctctgaagttatggtttttctcaatgtgagaggtaagatccttggttgcctggagataccttagttagtgccttcaggatctgaaacagacacattatcacacatggtccaaaggttcaaacctatcctttcatggcttagtgcttaacacaagacattgtccaaacaacttgtttacagcaatcctgtcagggtccctatagtttggttcctgcaagtctgtattctgtccttaatgtataagaacaatgtacattttaaataaactgattaaaagtcatgaagtttcactacatatatatcataggttagctccagtattggaataaagacttctctcaatgtttgtatgagaatttcatggtaatgaaagtgtcgtcatgtagtatcaatcatattaaattttgctttaaaatattgaagtcaccccataatgttatgaaatattaaaatcaaatatgtgagacaaaaaaggatctrcttcataaatcatgccagctaatttctggttggggaatgtaggtctccaaccagtggaatcatggtggggaggggttgtggtgcttcacatttatgaaagactgttgaaaatgacgatgacactggttttatctggggagtttttatgacctcacactcccagaatgacggtggtttgcctcaagtatgtagaatttgcctgccttcccaactgagcttcttggatgctatggaygcgttgaacagcatccttcacaagcgttaaaatccgtggtgaacctgtcactgccctcctacgtaaatatctgaccacagagctgctgctttgggaggtagctgtgatcatttctgtatcatgagtctctgagaagcataagtcacctgcttctcatattccagagttcagtagttgtctctaaatgagatagccatggctgggcgcaaacaagagaatacaaatgtctacgtgaacgggtctgtcctgccactccactgcgatccgttgttatttctgagaatcattttgatttttggactgcttatttcagtgtgtaggagtcttccttgtagatgaatgcctttcacgtacaagtctttctcttatttattgayttatttaaaaatttttccctacagagggagaaacaaaacacaaaaattccctttcctgccacaggggaaaacaactgtggcaaaacagagaagcccccgaagtaaacagagtaatagagtacccagcctcccatagagcttgcagaaatctcattgtgcagacatggagcttcccagcttttgccttgttagcctatttcttaaccagtaattctgtttcttaataggataaagggcctgacttacatgaaagctcaaagtcttaatcacaatgataaaatacaaagtcgtggcaactgtaataagtttaaagacatatgtagcttttcaaggacatcttgtctttaaggaaaagtctttcatttagctaaagaaattaaactgaattgtttagtcttttaaacaaaatgatgaatttagtgaagaaaacaaaactctcmatggctaatgtaatttatgcaaaatcatgcaattagtgatagctgtgctagactttttcttttccttaaccaaatgcgcctctaataaaaccatcgtgaggagcagtgccatctaatgtaagtagtaaacatggatagtaaatgattaatatctggtgaggcatgcagatggcaggacttccattttttctttgagctccttgtgcatgtttgctaatcattcttgcaaaaaaattgcaaagataaatatgaactttcaaaagtaacattcaacaggatatgaatgtaagaaatagtacagtgtgggggaatagtaaaaaccagcactttccgcctctgcatagtgaaatgacggtaacttgctgtagcgtaagcttaataagggttatatcattttcatgtatgtactactctgggaatggcccgggtcttgtgagtggtattttttcatcaagtacccagccagcgcagtcacyctgacagtccccccactgagataaggcatggaaaggtaaccctctagcaagtcctcgttgaggggggagcgttcaagtgcacagacgtctaccctgtgctatcctgagctgtagtcttctgaaatgatcgtttsgcttcccagccaaggcagggctcccccaaagttcattcccactcttgcagtttcacctcgggatgcttcygcagaatttcagcgcctaagcagacaaggtcaaagtaaaccgcttcgctgcttctggcgcaggggcccagagcgcgtgcagctccccagcacagaccaacagcaggagaggggtccgggcgggagccctgggctgtagataagcaaaacgcacccattttctctcctatttactccagaggcacctctcctcccccactcctggcatctctttatcactggctccctctccctgtggcatatttttgggtagtagaatgctgaggtcacagggagcggctctttatccaagcagtggggacatcagcctggagccctgagcatgaaccagcaagatgcagactctcgctcttgactttgggctccaggagctgccccgaccccgggctgcccgcgggctccctcctccctcctgccctcgcccgccagctcgcagtctcttaggtctgcagcgttggttggtttcccacgcctgtcccggtctgactcgggctgccaggcaccgggaagccccgcggcgccgaccccaacccgcagccccgggaaggtgccaaccccagcgagtggaggagacgagcatttcacgtgggcatctgccttcactgctgctcgcgcctctcctcaacggccggcgtcagggcccctctgttccaactcatcccccccccgaagttaatcagccgtacttgtactttccagggcgctttagtttggaaaatacttaaaagcctcgaaaccttccggggagacggccgcccccagatctcccagttttgcctggctagggctgtcgggcgctcacgaagctgtggcgtctgtctggaacccacatcgcagaggcgcagccccgctcctccctgacgtcgccaaagttgccagacgcccctcagcgacccggtcgcgccagatgcagttgcataaccttgccccccacctgcgaccgcaccsggtccgctcccggctgcaccggggtgtcccggccccgggagccgccgagtttccggccaagccggtttggggccgagtgtgtgcgcccgaatcggggtcggcgcccgtcccagcggtgctctgcccgcggccaagtacgacgggcgcgggggcgcgggaggagggcacgcggggctccgcttaccttccgctgcttacagataagtcgaggtcgatgcagcgcctggctcgggcatgtctcgctgcggaccctggcaagcctggggcggcacggagcactccggacagggcatccgcggccagactcgccgsgctcacgcggaggaagcctcggctccggggacttggcccgctgcgcgcctgctgcccgccccctccaccgctgccggcccggccctgctggcccggccggcccccgcgccgcagctcgcgtcgctcgcgtccctccggccccgcttagcgacgcgcgcggggaggcagcggctgggccagctccggggacgcccgcgcgctcgcttgctcgcgacgcggcggagccagccacagccacccggcttcgcgctcctccgatgtcctcatttactgcaattgtcttcggcgagatctcagagccagggccaggaggcgggggcggggcagaggagggagcaggagggaagtcctttccgctgctccaggtcccagctactccgcggagccgggcggccagaggcgagggcgccccaagccgcgcgcctgccgcctgtgcgcccggctggcaccgaggcgggcggagccccgggccccgcggggcggaggtggggcgggggcggcgcggggccgggccgggccgggccgcgtgcgtggggtgggggatagggagggagtggaggagccccctcccgccgccgccagagctggaggaggaggaggaagaggaggaggaggtggaaggagctgccgccggctgccgccggctgccgcctgcgcgcggggctccgccacagcgcgtcctccgggtttctgggctgcaggcggcgctgcatggcccgggaacttgttgagtctaccctggagccgcctccggagcagctggcgggcgggggactccgtgtgttctctcagggatggggggtcgctggggaccctgctgcatgactgtctgctgtgccagccagcctggcccggcggggctttgggaagccaggctcgaagggtgcgtgtcttgtaggtgcctggccgctcacctgcggatgctgccttgtagaagcaggagttcggggatcctttcagtgctggctccaacctggtgtcagcctctctacatggggacaggaggtcctatgagtggcctgaggactgaagtgggagggcctgcctggtaatgttgcatgctgacatttagggacactccagagcaggcgccactgccactcctagccaggaaccctaccccccmtccagagcacacaccacccgtcagcagaagccacagggcgcagaggctgagttcctttgtggcagagtagaattctcttgggagaggaaaagacctaggatgcacacggagctatccccgcccttaatttcccacccaccaaagagtattgggtgttttgagctcagagcagcagacccaggggcccctctgatgcctgtcaggccctggggtctgggccagggactaagcagccagccgagtgcagggctcctggccccctggatttgctcctagaatgtaatgtaaaatgtaagtagccacatttattagtctgtttctcaggaaaggtcagagaagtagtggaccccagggaagggacaggcttcggagaggaaattgggaggacaaatggaaagtcccttcacccacccacctctccagacacatcagtgggcagtgagacctctttgcctatacatccctgagtctctgcacctagcaccagctctgtgcctgtgaccaagccatagctccatccttgttcgctgagctgaactgagcctatcactgccttatagagtgtctgttttttataaatgactttatacgaaataccttctttgtatgtggatgctttgggcagtgtgtccagacatttcagaagaaaaaaaaatctaaaatgtcatctatttccctctttaccccgcagcatcctttggtatacaattttgccagccttggggatccagatatgcccaggacgggagtcctgagcctgtggatccaaactctgcccacctcactcttcttgttgttcttcttaactcagatcccccaagctgattttccagcttaccagggaggctgttgggagctggctggaaagagatgcttaattttgtgtgagcagtatggaaactgcagtcccctcttctgcctggaaggggcctgggaagggaatgtataggagttggggacgtttaaaaccagataggagaagttgccactctccagcatgttcccttggggatgtgctgttgcagctgtgggctccagtaattttcccagtggtctggggarcttctgtaaatcttactttattggcaatccataaaattgaaatctgccttccgtcttttaaagtgactgtaaataaagctgccaggaaacttgggcattgggctggtagtatcagaaggctgaagttttccgggaccaagagtgaaaacaggtcaacataaatgcatgcccagcaaggcagtgctcagccacaggtggcactgtgaactggcaagaaaacagctccaaggacagtgctatctgagattcgcatgatgtataactccaggaagaaaatggaaagccgtaattggcaggttagaaaatccacttacatgaagaggagagtataacggaattctgtagcatcatcaggactgcttagagttgttcaattgtgtagtagacttacagttgttttgctaagtctattaaaatcattggcatcgcttcttttttttttttttttgaagtaggaaaccatttacatattgtagtgcttaagtgcatgtcttcagcatcacaaatcaaaatattggtgaaaacttgcctcaccttacctttggctctggagagatattccacatgggtgaggtgtgtgtcatcatgctccaggctttaaagcaagcatcatgctgggggctggctggagagaagggagtttcagccatcttcctgcccacagatccctcttgcatttttttttaatagatgggatgtaggcatatttttagggtctagaatgagtcaatatgctcggcttcctcaggaaaaaaaaaaagtgaaacttgatagattcattttaggaatcaattggtattggctttttatattttgcttaagatttttgttgaaaaagatagacttgcaaaggagaaaatagctacttttcaagtgggatttcctaaaagcagaggaataaaaataagggaaagttcaagacggctaactaagcaaaatatccacgtctctcttcttttgccttcttcttggaattgtgcaggggttgtacagagaattgctggaattccacccctatggtatagtgagtttgaggtctcaatttccacattaaaaagtcaagaatatacaagtcaaacatgttcaagaatgttcataacaggtttatctatatctgttccaaacgggaaataatccaaataccagtcaacagtagataaagatttcttggttcttcgtatagtggaatactagacagcaacccaaaagcactaactgctgatgcatgctttggcatggagggcttctacaaaggtgcagaacaaaggaagccagacgcccagtgtttatgacatgattccctttagatgaagtccaagaatgcgacaaagttatcaatggtggaaaatatcagaatggggattacctttgaggcatactcgttgcccgggaccacagcaacttcactggtgctggatcattctgtctcytgcactagttgcttatgcagttttccacctatatagaaattcatggagatgcttcctgtctcagtgtgacctcatttgtctgagcatcatcactgtgtcattgcaatgtccacatgcatgctccccaataacccttacccctcagtgaaccagtgtatctgtcagtgtgattaacctgtatcctctccagtgtgcaaggcaggagaagagaaaagtgtctccaaactagcaactgcagaagaggagccttccagtttagctacacagcagaacttccttctttaggagactgccgatgaaacgcctgccctcccaactgtccgatgtcgctgtgacagagctcgctatggacgtgaatttttctttcccatgtctttgttacacaaaagcggtcccgatccagatcccaagagagggttcccggatctcacacaagaaagaacacagggcgagtccactgtgcaaagtgaaaacaagtttattaagagaataaagtagtgaaagaacagctactccatagacagagtgggacattcccaaaagtaagaggaggaatgcgtccagcctaggtacaatactcatatatatggggagctctgctctgctacgagggtttgtgataaaggattaaatttcttaattattatattttgcaagaatcgatattatctgttttcgtttttgtttttgtttttgttttggagacagagtttcgttttgttgcccaggctagagtggcgtgatgtcagtttactgcaacctccatctcccatgttcaagcaattctcgtgcctcagcctcctgagtaacctgtaaccacgcctggctgattttttgtattttagtagaaatgaggtttcaccatgttgcccaggctggtctccaactcctcagctcaggcaatccacccatctcagcctcccaaagtgctaagattacaggcgtgagccactgcgcccgatattattatctttaaagtaaaattaggaacgcctttgttctcaggatgtctggatattaggacactcccaagtctgggtctgtttagtaaacatcaccagtgtgttcccttaaccttaaacatctagaggtgaggaatgcctaactttctaagaatgcagcccagtaagtctcagcctcatttctctagtcctcactcaaaatggagtcgctgtggttcggatgcctctgacatctgcatattccaaagagactcatagatgagcccaacctaagtctgtgatgggcaggttacacccgtcagttcagaagctgtggtagcagatcagccagtgctcaacgcctacgagggaaaagtaactcatatcgccttcgacctgtagggtcgagatcattcccttggggacactttagccttgtctttcaagaacaagacagacacaatcctcaaggtgccccagtggggcctccttttctgccgagaagccctgcaggaaggctttctgcatcattccccttgtcatattctgctcgagccttcactctcctctttctgggcttatttctggtttaagactctcgctttgtgtaaagccccttgcccgtggctcttgcacggtcctggcagccgagccgtgtttccttctggtgggaaccagagctgtttctgaggtgctggtccatgttccagggccatgccactcctctggctttcttttcctttcatggtaagaaactagagatggtttattggcctgaaatacaaatttgttttggaaaacctgagcatcgtgaggactcgttgagatccctggctttctatgatgcatcattgtgaatctgatttatccacagaaatggaaggttttccttttgaaagagagggaagtagctctaggtttttgtttttttctaatgctccctgcaactgaggcagtgatgtatgggaataaggaagagcaggcgtgcactctggctctcccctctcccctcacaatccctcattttcagggctctgagcaaaccccaaggctttcccctcccaactgcagcctctcctttcttttaggcggactcctggggaatgaaacagaaaccctttattttgttgacctttatttggtcagtcttgggtgctggtttctatagggtttcttactatcccattctcgtcactggggagccaacctcttcagcacaggtagatggctcaatgggcttgtcttaatccttgctggtaaggccaccagtctcattgagcctgctgaagccaccttctcataaagtggctgacatgcccacagagagtgacacttctgatcagaactagggcaggaaggagccaggcacggtggcttatgcctgtaatccgagcattttgggaggccaaggcgggcagattgcttgagctcaggagttcgagaccagcctggccactatggtgaaagcttgtctctactaaaaataggaaaattagccaggcatagtggctcatgactgtaatcccagctagtcggtaagctgaggcagtagaatcacttgaacctgggaggtgaaggttgcagtgagccaagatcgcgccatggcattccagcctgggtgacagagcgagactctgtctccaaaaaaaaaaaaagaactaggacaggaaggggtaagaatggatttcacacttgagtttccacccaccagcgctgtgtgctggtgctggagctactggctgcccttcccaggccttctgccccggtgcacaggaggcttttctttagggagctgctgcagggaggcctgcagtcttctcccagctggggggtgtaggaacttccttgtttgccctccatccccaccttaggttccacaggcatggaagagggatggggtaaaggggaaggcaaggaacatggaagcctccttgttgtacttttttccttccccaagccctgactgaatatgagacttcgatgagaatgatgctccgcttcggttgtgcgcctccagggtggcaggtactcggtccattgtggattatatactttggttcttaccagataactgggcactcaatactgttaaactgtctccacagatgtggatcagagaacgtaaatgatctctccaaggtcacacagctaggaaggggtggagcctggattcaaatccagttctgtctgatgcaaccagaggacagattctgaccaaaaatgccaactgctcatgccaggctctcaggaagctgatgctgcgtccaggctggctggagagtagctttgaccagcattcttttgtcgtcattagccgtccctcattatctcactgtattagttacactttgaaataaaaacaggcactgaaacagcaatatactcaaatcattttgcatttcgatagcactctaagcttccccaatataatttcagtgatattctcacgttttcttcgttgaataacagctattaaaatgattcatcacaatatacgtatcccatctataccacaagaggccacttcacacccttctggtgccatgtataatggcatcgtattaccatggccttttgattatcttgaacacctctttggtgctgtcatttgctgagattcagtcatagtggacaggatatgtgtttttattttttttaaagatgactaacacactgtgcatataattctaattacctacccttgacattttatgcgcttagtgcaataaattattttgctagtttggtctaagaattgacgacctgactttagatgtatttatttcgcagcgtggctcatgggtgatgtgataacaagctatgaaacattggaaagcaagcattttattctttaacaccaagttccaaatgggaaaagtacagaattaaaaataaaaaaatctctagttatgtttgatgacctctgagttcctggaactgtcagttccatgttttccgtaaacgtttttttttttttcatattattgagtctttggagaattaaacagtcttcgctttaattgcactgcacggtagggctgcggatctccccgtgtccaattcacctaatttgtgttttggcacattctgcagctgtgccatactctaaatgtgtgtgcacccctcacttcggggttctcatatattagtccactaactaaagttaaagtaaaaaatcaaaaacttattttaagacatttcttacacaattttgattttttttttttttgagattcaaagaaaggcagggaatttggcttgtaaatgttgcttaatgtttttttctctttttagaaactccagtgtccatagtttaaagtgaatatggctagaatgttgtacaaacgctcctggcttcatccacatccctgtatctcggcagtcacagctccctggcaccttctcccccttgcctggacggaggcttctgagtgatctcctaggccttcctagattgagaggggaaagggaagatcttaagattccagaatattcatttcatttaagcgagggaggcaaatcctacagagctttttcccatttgtgttcatttattggctgtttccgtggattcgagaaagaaacttgaaaatctgttttgttttgtttggtttggttttgagatggagtctcactctgtcacccaggctggagtgcagtgatgtgatgttggctcactgcaacctctgcctgccaggttcaagcaattctcctgcctcagcctcctgagtagctgggattacaggcatgcaccaccacacccagctaatctttgtatttttagtggacttagggtttcaccatgttggccaggctggtctcgaactcctgacctcaagcaatccacctgcctcagtctcccaaagtgctgggatcactggcgtgagccaccgtgcctgaccgtttttttaaaaaaaaatagagatgggcgtttggaaactgagtcactcaaaaggtgaagtagctttgtcccacagatctgttactcagtacaaagttgaaaggaaacctaaattcattttatttgtgtttccagtgtgcatcccagacatttgtttcagaatttgttaaacattgaagaagatcacctagggttgagtaggtaagaagtaaatgtggctttgagaggccgtgatagccgataccctcaatggctgctcttggcctgttggacaagccatccttgcacatgacttgctatcctatgacccgcctccagatcagtcaccctccccatttgactgtgggtggcctggctctgtttgatgaccatgagcaataaagttaccctttcattaccatgccttgggctatctgagctggatgcccctaagttctaatagaaaataacatttattgatggttttttttttcttctctgaacccaaatatgacaatgaggaaatttattttaaaggtactgattttttccttccccacagagtaaatattgtcacatggaactgctgatgatacttctgagtcccttaaaataagacttgtgattcattcacaccatgaaaatggtagagaaccaacatcttcaccttcagattcatacgttattggctctttcctttttggtccgtgggtgttaatgaacattttcactctggagctttctctgcttccgactccagcgtggatgaaggagtgcagcttctggcctgcctggttcatcctctgggtctctcagccctgggatttccacgttccatctctgttgtggtgggcgagttgcatgatgcattcgatttgatattttacagaacctctactgagaaaatagggtaagcagattaaagctgaactcagacacgtgtttggcaaccacccactcttgatggcgtaagtggatggaggcaggtggccacagcaaacaccatgtggctttacgaagaaatgttcctcttccatacgttaggcctgtgtaaagttccttgttggacttttgcttcttcgatgacaatacatattttgttagtatttaaaggacatttttaaacattgctgaagtgcaatcagcttaaattgcgattcatatgacaagtgttgaaacagggtgatgtttgccatgaaatttaaataagctccgttaaagcagaaatgtctatataccatgtaagacacaatggtctcccatagccttcccctgttctttacttcttgacaagcatgaatagtctctctgtttgaatacagagtagagtcagttattttaaaagagttatcatctatgggtataatgcactttaagcaaactctttacatgcaagtatgacttatcaacaagtaaaccttaccaaataaatgctcattttgattaaggctaccttcagataaccactgtttatcatgcacttagagggattcagttttccaaaataatttaaaaggtgactttttagaacatcatctattacattgtcatctaccatatattcttcttctctttttttttttttttttttttttttgtgacagagtctcactctgttgcccaggctatagtgcagtggtgcaagctcagctcactgcaacctccacctcccaaactcaagcaattctggtgcctcagcctcccgagtagctggaattacaggcacccgccaccatgcccagctaatttttgtatttttagtagagacagggttttgccatgttggccaggctggtctcaaactcgtgacctcaagtgatctgcccacctyggcctcccaaagtgctgggattaaaggcgtgagccaccgcgcccggcctactgtatattcttatatatacatgtgtataagaatatgcatttacttaatacgctatcaatgtacagaattgtttgttgtggatttctgcacatgttccttgggtaagagagtcttgatgtgatttgcgctgtgagagcagaacttaggtgctctatgttctccaaagtccccctccacctcctggatggcatttattcagtagaatccgagctcaataaataaagaacctcgtgtacttcccaaagagccagacactgtgttagctgctttatacatacatctcttaattttcattttttgacaacattatgaactatgaaatattgataggacatgaaaaatcaagagctggtcttacggaatagtgcaggattccttccctgctccatttttcaaagctttgctccattggaacttaacaatgtgctgtctttcagtacgtctgaaggtctttttcaatttaaatcagtttattcctgtttttaccatatccagctccctgctactcctaatataaacagacttagtggcctattaagtattttacttctaatgcttttgagttttttcttggcagtggaggtgtaatctctcccaaaacctgcctgcacttcacagagaataggaccgcaattgccagaagaaactgaacctttrtgggggaaaaagaaaaatacagccttccctcattctccagtcttaattgagctaactcaatttatgccaaccagttcttgctggtcatagttctagagctttatgagaattaaatcctgatctcaccttaatcctcctaaaatctccgtgaaactgggcactgttatcagcaccattgtgaaatgaggcagcaagtacagggcggtccctaaatgtgactaagtcaggaatcttatgtagaaagcttacaaggaagttggggggtgattaggaattgtctccagaaataccagataaacagttcaaattttagtgaagcaaaagataggcatattttggccttgtttaacttrtacctgaatgtaccaataacacttttggaagacttggacgtactcttcctcttttcccaggaaaatgggagagtattcattcctgtacatattgagaacatggacaattctcacattttaggattgtcttaataggcaactgactttattatctacgtgttgattgaaagaatagctcatagcaggtgttaaaagtttttcctaaagagctacattataaatattttggactttgaaggccataacatcgtaacatttcaaaggtcatgaaaacccagctctgctggtgaagcagggaagcagctgtagagaatatgtagacaaatgggcaactactgagttccaacaaaactttatttacaaaaccaggaggtgggccagatttggtccacaggctatagttttatgacccctggcttatagcataagttgttggacagaattttgataccatatgtagacccaaattttaagaatgaattgatgcgtttgattgatcacaggagaattcagtgtttttcccctttgcttcttacatacgctagattgtaggctcacccggcctcctctgcgatttgggcagaattagagcagtatatcctatcaagaattacttctggcaggggatatggtgaaggggccattcatctgttagtatttgagtaagaaacagttccatacaaacaattgggaatagtaatgtctttgtcattgtgaaacggaagaattttgctgtcttagttatgggaatgctccagttatgggaactaaagtgcagtaattgctttaaatggacggtcatatatgtttggctccttagtccaataattttattcaccacgttcccctgagagaagacttgacaagacaatcctggacagtcagcattggattttcatctccagctgattgatttagtatttcatgcaacccaatggagtatctttgctgtagggttttaatactggagctattatgatgactgatgtaatttagtttcctgtattgatggtttccaaacaattgagatgaatagttaagtttctataattgttctctgtaaccatatgaaaaatgattatatattagcttaacatgagttttttcactaaaataaaaatcaataatcagttggttatccttttgaatattatatttaatgcctcagatttgaatattatcaggaagccaagatttcaagaccccgtttcatttttttaaaaacatgacaaaatgtgacatagtgaacattgagatcactgagcttcattgtggattagcaccccactttcaaatttgtcaacacgatatcatctgttagatgatatctaacgttgagatgttctctaagataataacgttgagatattctctaaagacctaggataaagttctaatttaatttcctattgcagtatttttgtgttgcctgtcattaagactgtggagcttccttattaattaaatttagttcactgtgtatattgctaccacttaccaagtggtcgttaatacagcctctcttaggtgatggctttttgtttacctagcgatgaaaagcttaacctacactgcatttttttcatgtgtgtttaaccgaaggaaacatctttgaatttatcttctcactgcataactggaaacactgaaatttatttgatgatccagaatcagttccttggtttttaactttatttccatccacaacaagtggcagctttgagaaggtttcatgttctttacactgagattccagtggatgagtctgaatgtttaactcccagaagttaggagaagattgagcttgcttttggagtttaagaatgaaaatgcaagtgcatgtgcctattttagggcctaagttggattttcataaaataaagcaaaatctgaggtcaccctgtgtgggaaaacctcatccgagactggagattgaaaataggagcaagggccaraagtagccgcctggagagcagagctaaggactgggtggtgcctgtgtgtcctttgggcacctggtgactttcaggacatcatagacgcaagggtgagggcccatctcatccttactgtcagaggcaacagtacagccctggggtgtatttcacattataccactagagctgggtgcttaaagggcatcatcaaatccatttttcttwccttgagtggaggtgcctttcatttgtaaatgatggatttgaaaaayggacaagtagtgaaaatgcaggaaaatgattcacatcagtaggtgctccagcagatgtggagtaaaaatcaacatgtcccacaaatgggcaattaaaggttacacatagaatttatgraaagaactttggagtgtcccagggattgcaaaggtggttataaatgcatgtgctcacctcttcctgttagcacacacacctaaatacgcagaatctctcagcagagacattccgttgagagcctacttaataaacctcattttaattttattcaccttagtaaggctgcaggagttggtaagtcccgtggacttggagacttaggttaaggaattccaaacttgactgctaggctgctggtacaaatcatctttctctctttctagtcacctggatacattatgatgcgatgccagacttccccaaaaccccaatcaagaaataagaaaagatttttctccatttcctggttccctcacagtgagaatgagattttttatgaagtcttacatttggtggttattggcccattacctatggaaaccrctgtaaagacctcacagtgctgccatcagcatgcgctctggacttcggcggtgccacataaggtggccccagtgctcatcccaggaagaatggccccygsttgtctcggcaaatgactcccayggaagctgtggagagccacgaaggtggcaggyggcattagaggggctgtaaagggaccratgcctgagaatttcttctgcaggatgtagaaccgtgtgcatttggatgataatgcagtcagaggagggcttcctgtgattacggtggaataactctcaggctgagcccgggaaaccaggaaatgcacgtctaccaggagccgaagcagaggggtttctttttccctcttgctctgtctcgttgaaccttggttcttctatctgtccctgagtcctgcctctgagccactgcctgttccctgggtggctccagccatggactgcatgggtgccaggcacatagctggtgactctgcccctctggtgagtgcagcatggcctctgctctctccccctgcctctttttgttttccttttctgagggttcctcagcctcatgaagtttaaagcctaatgcagatcctctccctccgctgcattgttctaggtgtcactgaatttctccaaagagaaaaataaaaactcagaatattcttgtgactgatttctgaatgtgacacgtggcgtaatgacttaaacgtattacagccagcagctcttggtataggacccatgatattttattatattttgtttagcattttgttgtactttattattttattgtctttgttttatttagaacactttatatccacccttttcacagagttttaaatgtacgttacggtactgttaactctgggtacgatgttgtgcagcagatgtctagaacttactcatcttgtggaagtgaaactgtacaattgtgtctgtgatccttcttaaagccttagctgggctgctgagtcctgcactctaactgcaggaagggcagctaaggaaagccaagtgcaacttgccagacagatgggattttcatgtctcatctatcaggcaagacattgtctcagtgtactcagcagactcctagactcgggttctgggctgatgctgtcagacatcataaaaggagagacactcctctcagccatgctcctaatacccctgataagcatgctcctaattcatctactgcccttagcaaagctgccgtttgtgtctccgatttggtgtctttatagacatcgccatcccctgttagtgaatttggggtcttgagacgtcatctgatgaggacctgctgtttcacagaggaaatataactgtctgtgtgctttttattattgtcatgtttgctgctgacatttcacagctttcatttattgaattttgaagacattgattttttcttcatagcagaaattatggatcagataattggccaaataagaaaaattcagacagcattgtttttctaaacatactgaaaataacgcatgtacctggtgaaaagtgaagacgtcatgacagagggtccagccctgctgtccaggccacccccaggatgggagccctgaatcctcatgggatgtgcgctgagatacaaggaggtccctgcacacacctgcctttccccgctgctggactcttgcaaatcatttcctgtgagtgtcagccagcccactgcatgttccgaaagctctgcagagtgcgccaatattccagagtttcaaagtagtgccctttgaaaagatttaaacctgcaaataaaattaaatttgcatttgagaatacaatgtgttttccttcttgaaggacttgatgctttggtgaataagcatatattacaaaattattcaatcacccatcacaagtgggtgtgtcattccagctctgtgcatcctttcaatgactccgaggatgatatcctcacggaagcagagttatttaaccccagttcactgatttctcagagttgtttacaaggcggctttccgtgatgtgtctgcttggrtaaggcattaaattatttcaagaatcattttggtctttgctctcaagtaaaagtggttttagaaggaaacttctacctggccatcgtgtgacaacactggctgcrtatcaagaaaagtgagactttattttttgcacatgattttatactcatgtatgcttgaaggaatatgcaagcgtcgtgagatctaatccatacagaagttgagaatgtgtttccattagaaggtaaagagcctctagtattcaaagcctttgattcagcgggcaggtgcgaacggtggaggactgtgcttctcgcttgcagacacctcgaattatttttctttagctccctctgtgctttcagggagcctgcgtgagttaagcctctccttgtagtgatttcccgatgcccagcaaggccgaagctctcatttcctttaggagtgttgttttttttttctcaatgaaggatgaattttctaaatccataattayacctgaccatgatggcagcttctctgttaagggcttggaaagtaccttgttaattacttgacttattttgtcaacattttttcatgttctccccaccccttgccaaaaaaaaaaaaaaaaggatggagaatctcatttttgcttcagcgtctcttctgtgatgatttcttgcttttcaattcacgtttggaaaaatgttttcatttaaacaacctccctatttaaaaaatttaacagtaatacctgctttttgtaatgagtgaagataatacaataaggatgtatgaagtcaaagctaattaatcattcttctcccccatcccctttctatccatcccctttagattactcagtaatgtcgacagcttgctgtatgtctttagacaccttacttcttgtttgtgtgtacccatgaaagcttttatatgcatagatatttcttttacatgtatttcaaaaagctcagaatattgttgggaagggaagagagagaaaaatgttttctttgatttttaagacagtacttggaagttaagtgtgggcatcagtgtaagtaagaagtaggatgctagagacagaaagaacaagatgggtagtttttctttttattcaaagcaatcagtgatatgttctaatgctttggaaaggttctatgcctagaatgttcccaagaaaggtctgatttattcttcataaagtacttttgtgtacttctgagctagggtggaatttacatggtttggaatcatttttgggggtgtttttcaaaatgtttgattggaatagtgataagttctctttaaagagattgatcacgtgagattgggtaacaccaagatgaacagaatgaaaaatgtttccctatagcagtgctttcagaaacgtgaatacattaatgtacaccaagcatttgtagaagagggattagggctcagcattacagtgttttcctaactttccttactcacaggctccttatttatttattttttgttaggctgccgtggccagcgttccaggaaacacactttgggaaatgacgctcctttggctgtgtagcgcacaaggggctgtgagcttcccctgtagacgtttctgccttattccagctgatcagtaatattcatcagcatcatttcattcttttttttaagacggagtcttgctctgtcgcccaggctggagtgcagtggcrccatctcagctcactgcaagctccgcctctggggttcacgccattctcctgcctcagcctctcaagtagctgggactacaggcacccgccaccatgcctggctaatttttttgtattttttttctttagcagagacaaggtttcactatgttagccaggatggtctcaatcacctgaccttgtgatccactcgcctcggcgtcccaaagtgctggggttacaggtgtgagccactgcaccygayctttttttcacttttaaatcaaaacagatcattcatacaagagaagaaatacatatgtagagatgacaaatcattcagtgggcctctctgtaatgcttccygctccagtccctgagtagctccccccgcccagctgtgcacgtcttcttctttgtgatgtggtctctacacagatttgggattcattttccctcgcttctctttttagttttaccacatattaatgtatccttaaacaatatgttcttaagccttgcttccttttgccrtttatagaagcagagtcaaacaatatatatttttccatgacatgcttttagctttcagcactgtggttttgcagtctctccaggttgatgggtgcagctgtggtccattcgttttcttagctgaataatactcctgttgtaggaatagatggcagcaagcgtaacccctcttcatggatgggtacctgggtgatgccagtgtttgctattaggacagcgtgttagatcctgcatttagcgatctccaggcacacctgcgggagagcgcctccaggaaacacaccccggggtaggattgccaggccaacaggtccttaaggcagatgattaccttagggaaacagaggcccccagtgtttcttaggcttcagaagtgtggtctacacagcaatagtaatatgaagactcagctaccgtgattccttctcagccactcctcctcttgtcctaacccagaatcatatttatgatattgtcattttaaacatatgcgtgtagtttctatgtgatggaatatggtagtgagaatctaagtatccagcctggtcacccgctcctttccgcctcacgtgcaggatggttgccctcatttaatcatcgtgtacagtctccctcgggcaccctgagccctgcatctgtttcacccagggcctccctttggttctcgttttgttctttgcctcttccaggactcctgcctcccttcctgcctcgctatcagccttctttagaatacatccccagccacgttccacacccaatggacagcttgtgtaatcatgttctcccacatccctaggagtcctgggatccatgagtggctgtttgtaaatctcaggaagctttccctgtcttcctgccctgccctgtcttccttcccctggtccactggcctcgggtttcctgcagcatccatggagcactagggaagacccagccacgcagctccatgtgatccctctgtggtccgcctggtgctactactgaaaggagggtctctgttacttggcgccaagcatggcaggtccagttcccacggatagccggggcatctaaccaagataatttagagcagaagctgtagctacattctgtacctgtttatcttgagttcctgctagcaggtaccaataatgatggattgtgaacaaacagctctgccttgtttttttagaccctgaaatagacagrttggctttgataatgctttttgactgatgggcactttttgtaactaaatcccattcaaaggcttaaaatatgccgcccaaggttgatttcaagatatattaaattgacctaaagaaaaataagtaggaaaaaaagtcctacctacatatgggatgatgtatggacattttcaaaatagtcacaacccaactttaccatagcaaaaacaagcaaacaacaccccccctcaccccccagaaaacaacaaaagcaaaaacatcaaaataatccctgcagtgaaacaagatttcccctttattactaagtaccttcagccaaaaggaactgcaccacttcatttaaatgtggttctgaatattcgtttgtgtttgcattgctggattatctaactgctgctttccatctgaaacgtaagccttcagagatgttgctccccagtaaactatcttagctttgccaggaccgggccttcactgagtgtaatagaatccctgatccccaggaggtagggaaggggctgacaatgacatgcatgaatgagaatgttttctagagaggatgtagtctgccacgtcctggagctgctttagggagagcaaaaacctgtttgtatctttcattatatatgcttttaagtacccaagttaggaagtagctatctgtgagcttttctaccagtcttcatgccaaagtgataatttagtaaaaaaaaaaaaaaagaaaaagaacaaacaagccctcgaaaccaacctgaaagcgcaggatacagatacttatgggcagagagagactattgcctgtctttggaagcattgccagctattgctgggaagaccactcctgcttagaggggtggaattctttctgagctagcttgtcctggaagtctccgccccaagagtgttcttgatgcgtgtgccttacagccattgggctgggcawcctcacctttccattggctggaaaatgaagaggataaaccccactctcatatgtaggcaaaaggttccttttgataaagtcgtgatttctccatctcaataataatagtaatgcacccatcccaaccgccccagagctttgctgttcaggaaacataggcatatctcaaagtaccctttaccttaattttcagaatcagtgccttgtctcatgacttttcaaggttggtgaagttctgaagtacttaaaaaaaattgctgatttaataaacttgctagttgaataaaagagtcagaccaagtagaaagtcgttttaccacagatgtgactttttctttttgtggtgagtacatgtcgtgggcagtgcatggggcctgtcacaactggcatcatttccatttggttgaaatccgagcctctgcatcctgccttgagatcagggcagagcccttgctttttagtttcatggaggctacattataacagagaggaagagagggagagggaaggaaaggaggagaaagaaagagaaaagaagggaaggggcacaggcaggaaaagaataggaacattccaaagccatgtctcaggacattagagctagaaccagtgtctgtgctaatgggactcttgcaaacaccctcttatttcactttacctggggttagtttttggtttcctgctttaacagatgaaaacaggttttttaattggattctgcacattacccctgtgaaactgcagaacataagcggtttaagtagtttcacactgggctttatttcattagtgatatgctgtatggattgtaattctcataaactgataatatgctgatttactggaaaccaaattgacaagaagcctatcatgtgtattggcagtctgttcagcttgctggacttggccaggagaccttgagctcctaagattttttcatccttctcttaaaaaatagcaaaaacatatctttattttcagttattaaattttgagttcacttaacagtttcttatctgtttgcagaaccacatggaagtaatgataaagtcttgtttcagatatataaggccaacatactaaaaatctgagcataytcaaatatgcttctgcatcttgaagaataaggttgtctatatgctagtaacatttatctgaaaaacatgccacatagaaatacctttatggggacttggccataaattctttgccaaagccaatgtcaagaagggtattaactaggttttcttctaggattttaatagtttgaggtgttaacatttaaatctttaatccaactcaagttaatttttttcatatcacggaagttaaagggccagttttatttttatgcatatgttaagccagttatcccagaaccatttattgaaaaggagtcctttccycattgcttttttcttttttttttctcagccttgttgaggatcagatggttgtaggagtgcagctttatttctgagttttccattctattctgctgttctaaatatctgataaaataaaagttgaaatttttaaaaaagtatctttatgaaatctaaaaattgtggaaagtaattaatctcattaatctaagagaatccttgttaatgtatttgaatacagatatttatagaaatacaactataatttgacctaatatgcagtagtatacatgagacttaacaattgaaattgttgttttatctaaacagaatctgctcatttcctttttacaccagcaatggtagagccagagaactttggttcacaatggaatcatcaagtcataaaacttttgaacttcaagggatttttccatttttttttggttggaggtggtgatagggaaatcttcttcaatgacaataagttaatgacttgcattacttcttggccaaagttaagactagaacagaagttttccgactcccagtctgttcagtattttccccatcatacctgtgattatcaaccttttctcactctgccaaccaaaaatgttcccttggaatgacttctgactgtttgtgctgaaatgaagcagtrgtttttcaaagctcacacatgaccgtatggactctgcacagttggtgccatattaaaatacaatgtctcttacctttttttccctccactttctgttgttatttcccaatcaaagtaaaaccagtattaaggtctgtcttagttcactttgtgatgttataacaaaattacctgagactggtcatttataaagaacaaaaatttgtttctcgtggttctggtggctgggaagtccaaaatcaaggcaccagcaagtttggtcgtctggtgaggtctgctctctacttccaagatggcgccttgttgcttcatcctctggaggggagaaagctgtgtcccctcctggtgggatggaaagggaagccaacctagggctaagtgaaacctcttttttaagggccttaatcccacctcttaaaggatgcacttcttaatactatcacactggcactggcaattttggagggggcacattcaaactgtagcaaggactaacttctagcatattgtttatttaattccccaaattaagtagtggggactgcagattagttctgaagttttcctttcaggagaaagtagaataaatgggtaaagaagaaaccataaattcatcttgggtggaagtgcagtttctgaatatattctacacatcccaacaattgtgaatgtgctttgccatcttatcaaagcagtattatattatagaaggaaaggctttggttgagcatatggctatttctgagttacttagctttatattaactttctcatcascagttggcctacttgcttaggccaattagtccttggccattttgtctatgtgggcatgctaggtcatgtcagggctgattttttcttctcaaaaatttttaattgtggtaaaatatatatcacatagaatttatcacctttgccattttaagtgtacagttcaatattgtgaagaacattcacatttgtgcatgactaaattccagaactctttttatgttataagactaaaactctctacccaytaaataacaacaccscatttctccctcctctcagcacctgtagaaccaccattctacttcctgtctctatgagtttggttactctaggttattgggccaattttgacagcctttcttgaggtggaatcctcttcccaacatacttatttccattgccaaccatgaccctgcccatggagctctatcctacactctatcccatccccgtcttcagcccatcctgtttggtgacacccaccatggccccagcccacatcttcagcaggtgcagaatgtctcttagtgttgacttacaccctggcagtcctgtgcaccattcacaggatagtcttacttacagattgagaatctacagttttgagatcattatctttacatttctgtatcctccatccttcacagagtcttcagcacagagcatgagttcaaaatcaatgctgggagcattaggagaaaattacagagaaaaaaatgttcaaagatttcatgtagttaaacattcattccttccacttttgcatcctagattgacccctcttgtgtcttcctagataaatgggaagttgtctgtctcagttgatgtgatatttaaatataccagagtttggagtttgcagagaaagagtgtggagaagctaagtagggaaacttgatgagtccctagactgaggatacaggagaatgaagaggaggcaggagtggggaggaaggaacagagaaccaggaggcccagggacgtgtgtgttgcagcagctttgagtgtgaatgggcaagaatgaactgcacgtggggctgccacatttaacaaataaaaatataagatatgcagtcaaattttaatttcaggtaaaaaaaaaacttaagtctatccatgcaatatttaggatatacttacactagaaaaaatgttgcttatctgaaattccaattttactgagtgtcctggattttgtcttgcaaccctagctgtaaagggaagaaggagctttgtrgggtagagccaagcattggacaaaggcatggatggaggagcgatcggtgtccccagtccagttcagtaatatggagggcggagggtggagattacaagaattacaagcaaagatgggggcygtagaattccatcttctacctttaaagamtttgcccttttttttttccctttaattgatttttccctctgtttttaagttgttctcttttgaatactctgcttatagatttatttcctaaacaagtgctgttaaatggcctccacttcacaggctccatggaggagcagagctctcctctctctatgccgatgytttcagcatcctcagaatagcagctggaaggcagtaggttttatggggataactgtgcactcaccagtttagatgtgtggttgctaagagtcacggtatttgtttgcaaacctgttggtaccattggtccatgtttagctttgtttaatatacataaacaaaaaagtgtaactggaagctatggtattttatttttcaattagctatggaaagtacaagaaaatcaagttgctaagcaatttctgttgaattggatgtgggtggaaccattatcaaaggttggaagaaatcgtaaaaatggaggagcattttatattcacgttgtttttcctatgtcttcaagttctttaaaggaactgaaactggaaattgcagaaaatgcattatgggtgtgatttatgaggtaaagaagagtacacagtgcatggtgtgttgttatggcaaccctaggaaactaacatcaagatcttaactcaagatattgatcytcatgtatgttaacgtgagagacatgtgtgtcttgtgtggagggcctctccaggtgagagggtggctgtgctttcactcatggtcagctccagtctgctcagggagctctgggcatccatgtgcccatgtgtcatccttgtgacatcccttcagtgtcagctacttttatcctttgatcaattgctccagggctcataatacatgatgtaattggttggaaacgtggatgtccaaaaagtgcatcaacgctcaaggtcatgtgtcctttgttttgaggtgtcactctgggcagagctgtccggtgcaactcaggggaagtggtgtcctggtgagaaccaagtcagaatgtggcttgaaatgagctcttgtatgaagctggcaaattatggcttatctttcctttagtaggttttcttcatttatttccttaatttaatggaatgccttagtgctatttcaattaaaaaatattgatggtaaatgtttgggaggacattctgcatcctttgatgctcaagattttctgttctccaaagcagtagagacattagcctcactcaaaggagagtaaaattatgttcaatgtgtaaacttgcttgctgcgtaacaaagtaatattatggcagggtgtttgacagagactctttagcttaatgaaattctatcagggagatgcagttttaatagcgtcgttcattgctttttgtccctgtastctttaaaggctcacatgtggggaggacagtggctgcatctgagctgccagcagcagtgcaggagttcagatgtgaaatttcactcatgccagcatttccagcatttatttttaatcaggatctgcgcttaccgatggcctgttaaaaaggaattgtgtaattagcctactaaatcaccttttcttcctcagtctcttcacatctctgaaaaacagcccccatatcactgtggcttactctctctctctcaatatgttgtaggaactacagaagtttcagcatacccacaaatactgggttgaatacctcttttcaaacattagtttttgaaattgtagtcaggtttttaaaaaacggttgaatcagagtatatcaaattgtcatgttaacgtggtaacatcataaacaagtttccttgggagataaattttgtggtttctgtacatagagaccacctttctttttggtcgacatttcattcctcctgtgtttttgttttgtgttgtgttgtgttgtgttgtgttgtgttgtgttgtgttgtgttgtggagacaggatcttgctctgccacccaggctggagtgcagtggtatgatcgtggctcactgcggccttgacctcctaggctaaagtgattctcttgtggagattaggtctcactgtgttgcccagactggtctcaaacacctgggctcaagcgctccttctgccttagcttccccaaattctgagattataggtgtgagccgctgtgccgagccagtttctcctaggttttaaaagattgactttatagtttggatctgcaaataagttttaaaaaattgtagaacctgttcccatgtatccttcattcagtctctgccctcattattgacattttgtgttaycatgtcacagtggtcacaactaataaatcaatactgaaaatctctttgaatttataacaatgtctgattatttagttttactaatctcaaaatttggaacaacataaatcagcaactttcaaggtttttttctgaaagaaagtagcttagaaatgtatacaaaagcaaatcaactcaaagtgtgtgtttatcatttagaaaggtaaaaatctatttttcctatcaaaattatctcttaatgctttttaatttattttcttgagtttagtaattctatcttgctaatgtaccttcaatttctacttacttagtagaatgttaatattacagatcgagcatccctaattggaaaattcgaaatcggaaatgctccaaaaccccaaaatttttgtgtgctaacatgatgctcaaaggaaatgcttattggagcattttggatttcagatgagagatattgaaccggtaagtataatgcaaatattccaaactctgaaataatctgcaatctgaaacatttcttgtcccaagcattttgaataagggatactccacttttattcttattcaccaagaaaccaccagagaagacatcaagcatcaagtgaaagctacagatgagcactttacttttttgggagtgctgtttgttcgtataaagaagtgaggctttttaagaagtggcctttttaggccttagcacctttttaagctgatcactgtctccttgtctatagaggggacccaggaaatcttaggtgacagtgaggctcagggtggagcttggttacttgtctcagcatcaagggacaggatcaggggaaaggatgctgagctgtgcttgtgggtgagaaatragttaattaagccctttctgccatgataactctggtgtttgttttctgctrtttaggctatcaaagttagttagtgactcacagcaaaaagaagatactgatattttcttgggttttgtttataatcatgttttgagcttatatagacatgctctttcttaaaattcatttatttgcttttcatccatggaaaaccagttttttttcaatgagttataaagtatttaataagaagagattctgatttaattatatccagagatggctttggatcatgttatttaagatggagaatgactatttagaaatattaatgtttggccgggtgcagtggcacacacctgtaatcctagtactttgggaggctgaggcaggcaggtcacttgaggtcaggagttcaagaccagcttggccaaacatgttgaaaccctgtctctaataaaaatacaaaaaatagccaggcatggtggtacacacctgtaatcccagctacttgggaggctgagggaggaaaatcacttgaacctgggaggaggttgcagtgagccaagatcatgccactgtactccagcctaggtgacaaaacaagactctgcttcagaaaaaaaaaaaaaaattggtgtggtagtgcatgcctgtagtcccagctgcttgggagcctgaggtaggaggatcacttgaacccagtaggttaaggccgtggtgagctctgatcacacccctatactttagcctgggagagacagcaagaccctgtctcaaaaaaaagaaaagaaaagaaatattaatgttcatatgtatctatatattatctatatctgtatatttttatattataatttaaattatttcagtagaaatttgaagtaggagttttagggagaggsaaaaaggagtgcatgcattaaacattcctttagggtcaagacgatggagccattgagtacattttaatgaatgtgaatgttatctgggctgctagaaaagaatgaaaaagccatacttaattgtttaaggaaaccatagaagaatctactgttgggtaagttgctacccaaatatacatacattctttttcaaaatatatcctgaagttcatattttccaccattaaatctattctcttcctgccaggaaacctgaactagagaggtttggaggtcttatgttgttacgtgccaaaaatatagaaagtaatttatgagaaggacaagaattgtgatacattactaaggcgcatgtaattttctaagtactaaactgacaggtgttttatatatatatttatgttttattggtaaagacagaaaacaaatacatcttagtcaaacagtgttccccgacttaccccatcaatgccaagggcacaggagggggtctgcagtaacttcctgaagcaaagcacggaggagagcaggtaacccatgacatgacctggcttgcgagccttgatgttttcygtgggtttcattctttcctttgagatcccaggcaaatgacacaacataggttgtaatggaacccctccttttccttgtttagactcttgaacatctcatattgctcctgactgccagcaaccaaatgaagggcttcattagttatagctaattaactacacaccagactgaaggatttctagccaaggagtttggggttgctttggaataatagcgagaagctagtcttttgagttttaactgttggatccctagcttagaaagttaccagtaccctttttaattttttactctgtaatgggcaggaatagaaattatgtacaacagtggaaaagtagaagaccatatcaaacctgatgtacccataagaagtagttggacgggcatggtggctcacgcctgtaaccccttcactttgggaggccgaggcaggtgaatcacgagatcaggagttggagaccagcctgactaacatggtgaaaacctgtctctactaaaaatacaaaaagttagcagggcatggtggcgggtgcctgtaatcccagctacttgggaggctgaggcaggagaatcgattgaacttgggaggcagaggttgcagtcagccaagatcatgccactgcactccagccggggcgatagtgcgagagactctgtctcaaaaaaaaaaaaaaaaaagatgtagttaatagcatatgcttctccttaagtgatcacccaagttgttggagtttcctaatcatcagtttttttctctgtcattttgagcttcctggaataggactgaatttgcaagttgaatgattatgcataaggctcaagaaaaacttgaaggcagataaaattgatttatactccttagctctaccctaccctatctacaggtatttcttggcggtcagtgaaggatcaaacaagaacagggttgggtaatgctgtcagcaggcccactacatcccatgccaggygctcatggcgtcctgtctctgctcctgcctcactttccacctctctgcccagcccccataaatagtatgtgggaagctgggcacagtggctcacacctgtcatctcagcactttgggagccgaggtggatggatcgcttgaggtcaggagttcgagaccagcctggccaaaatggtgaaaccccatctctactaaaaaatacaacaattagctgggcatggtggtgcgtgcctgtaatcccaagtactcaggaggctgaggcaggagaattgcttgaacccaggaggcagaggctgcagtgagccaagatcgtgctactgcattccagcctcggtgacaggggaagactgggtctcagaatgaaaacaaacaaacaaacaaacaaaaaaaagagtgggtggggctcctgatgccttcgccattgtgattacacaatacttctacctggactgcctttctcccgctcccatccccaccttcacctgggaggcatgctattgcgttccccacagcacccaagtcaccccgtcatggctctgtcatgctgcatacaccactgctcctttaaagggtcatttctcactagacacaggggcagagaccatgttgcgtattttcttccatgccccaagccccagcaccggacttggcctatagcaagtgacaatgcttgtttttattaacgaatgagtacacgatcccaggaatctcgttgaagtccagttctccacgtggccacccttgactcccacagctgacctgggattgacaccgtggccagccctgttcctcacctgatgcctgcctgtagtcttcggccttgctgctccagaacttttcatcgtggcccctttagggccatggcagcacaaatacacttagtaggtgaggccatgaggacacctaccaccattaaggatgcctrtggggagtagggagatggaggataggctggtaagaccctgccagtgcgggcctgcctcagtgccttggaacgaggtattcccagtgcctctgagctgcatcccagtgtgtcctgagcacccatctggcctggcaagaagcaggcacgaaaggcatatgggccgtagcctctagcctcctgccacctgcattccaagccacgttccagtagcactttaactgaaacatctagctacacaagatgggctgagcactctacacagatgctggtccatgcagaaacaaccctaccccttctgcacctgaaagggttccctctgattagaaaaggtttgcttcaagttcggttataaaggaaggcttgtgcatagttagtggggaagccacagggatgtgcaacttttccctacagccctgaggttccaggcactaagaacttggcacrtctttccatgctggctgaaatcaaaatgaaaccttctttgacttttgccccttctgctggggcattgacattggggtttgacactggctcagacagtcaaatctggaagccaaaccttagaagccaaatcttagggtggcattaggactaagctgagaataaattctcagtgatcccattcatctgcctcccagtgtactaaagtaggactttgaaccttccagaaacctgatatgttggcaatttctcaagctttgactctttcttccccattgcctctaaaccctagcttgaattttactggctgccttataattgctatttgttaaaaatcaaaacgattttccatcctggtaaaatggtaaaaatatcagtagtttgcagacagtaaatatctgtctttaatamttcaaaaacaagccatatttgcctcctgcctgttttccttatgagggaattatgctgtggggtggtagagtgagaagggttaaatcactggggacccaccttccctcgttcctcatggaatttagatgaatgtgctcttgctaaattctccagaacgtgtatgtgcgtcacccccacgctgcccggcccggaggtggctggaagtctcactttgtttttcatctgctgggtggtgaccagcagagagcactgagcggactgttctttccaatgctataaaaagcctgtttgcaaaatgaggatttctgcttccaggggctgaattccacgtctgcattatgcttgctgggtgggtaccaggcacagtctgtggcttggtcgtagcctttgccatgtcttttgatgatgtgacatgcctgagacacatggtggagctctgcaggtggtgagcagccacgaggctgtgcttgcatgctggagcagaaccttgttactgctgattgaatagtctcgcagaccccttttctgtcaaacgcaaagccatgtgtttttgttccatgtggaaaatcacacacattctctagcatattacattgtcattatgtcaacatttttaaattttattgtttaaattgacgaataaaaattatrtatatttatgatgtacgacatgatgttttgatgtatgcttacattgtggaacagctaaattgagctaactaacatgcattctctcacatacttatttttcacgtgtggtgagaacacttaaaaactaccgtctttggccgggtgcagtggctcacacctgtaatcccagcactctgggaggcttaggcgggtggatcacctgaggtcaggagttcgtgagcagcctggccaacatggtgaaacccygtctttactaaaaaatacaaaaaattagccgggcgtggtggtgcgcacctgtaatcccaggctgaggcaggagaatcgcttgaacccaccaggcagaggttgcagtgagccgagatygcatcactgcactccagcctgggtgacagagcaagactccatctcaaaacaaaacaaaaccaaccaaccaaacaaacctcacaaaactactgtctgcagttttcaagtgtgcagtatattgctattaactgaagtcaccgygatgtagacttcttgaacttattctgcctgtctaaatgaaattttgttttctttgaccatcgtctccccggtccccccgctctccagtccttggtaaccacaattctactttctgcttctatgagttcgacttgtagagtccacttagaagtgagatcatgctgtgtttgtctttctgtgccttacttattycccttaaaataatgccctccaggtccatctatgttgttccaaatgatggtatttccaccttttttaaggctgaacagtactccactgtgtttttagatcacattttccgtatccatccattgatgcacgcttaggctgtttccctattttgactattgtgaataacgctacagtgtacatgggagtgcaaatatgtcttcaacatattgatttcatttcctttgggtatattctcrgaagtgggattgcagcatcatttgatgattttagttttaatttttcgaggaccctccattgtgctttccgtaatggctgtttacaaatttacactcccatccacagcacacaggggctcccgtttctccacatcctaacacttgttcttattccttttgttgatagtagccattctaacaggtgtaaggtgataatttattctggttttgatttgcatttccctgattattagtgatgttgagcattttttcatacatatgttggccactttttattttgaaaaatatctatccagtgatcaccttagccacacatgtactaaatatgtctgtccatttcctttgcccctttttaaaacaggtcatttattttcttgctattaagttatctgagttttttatatatttgagatattaatcccctttcagatatatgaattgcaaatattttctcccattttgtagggagtctcttcactctggtgattgttccttttactgtacaagagctttctagtttgatttaacatcatttgtctatttttagccttattttttattgtgctttttaaggttatatccaaaaactcattgctcagaccaatttcaagaggttttttttctttatgttttcttctagcagttttacagtttcaggccttaggtttttaatacattttgagttaattattgtatatggtatgagatgaggttataatttcattcttttacatgtggagatccagttcttccagcatcattattgaagattatcctttcctcattgtgtgtttttggcatctttgttgaaaatcaattgactgtaagtgtgtggatttatttccaggctctctatcctgtttcattggtcgatgagtctgtttttatggccagcactatattgttttgattactatagctttatattagatcttaaaaaatctggtagtctgatgcctccatctttgttatttttgcccaagattgctttagctattctgggttttttgttttttttgttttttgtttttttgtttttttgtttgtttttggtggttccaaacccatcttagaattgttcttttaattttagtgaaaaatgtcattggaattttgaatagracttgcgttggatctgtagataactttgggtaatatggatattatagcaatgttaattcttctaatccatgaacataaggtatcttccatttatttttatcatcttcagtttcatcaatgttttatagttttcagtgtacagatctctctctttcttggtttaattattcctaagtcttttattttttgaagcatattttatcacacgtttgattacttttattaatgcaactttcattaaacaaccagaaatttttgttttaagactcatctggtaattcttttctatcagagcagggttaaagtttgctttgaaaatgatcacatggagatcaaactctctttagcgaatgggtagactgaatccaaggcttttttttttttttaacatttaaatgccctctccacaagccccaccacaaagttattttgaaaatacgaattcagtactattcgatacaagaaaatgttggtgtagtcagtgtcttacaatgtatattttaagtgtattgtaaaaaagaatattcagtgcatgaatttctttttcttattcttttttttttattttgaggtgaggtctctctctgttgcccaggttggagtgcagtggcacaatcatggatcactgcagcctccacttcctaggctcaagcaattcttcttcctcagcctccccagcagctgggacttcaggcacacaccaccatgcctggctaaacacatttctttggaagagtgccatttagctagaggcttggggatctttaaaaatactagaaatgacatctataactttgtcagaagcacattcactcattaattgatagaatcattgtccccttatttagactcaaggcttttgttggaataaatgttttcccttccttcttgtttgtgttaggctttcttcttttctttgccttttaatgttctttcaaacaaatagaagactgagtgcattcgctcagacatcttcatttgttcaaataaactccattttttcagacagacttgaacaaatggagagacagttcgtgtgtcacctaggtaaaggctgtctgctaggggtccttcaacaagcaaaaccaaggtccctgcacacatggagttcatattctagtgaggagagacataaacaatttatgcaatttgtgtcaacctgattggtgcatggagaaggcagaaaaggagggaaggaagtgagccaggyggtcagctggcagagaagcgttccgtagagggtacaggtagagtacaatcctgaagggtgcagaccttttagttctgcatcttggtggtcatatgtattggaagagcttgagaaaaatgaaaataccatttagcttaagaagttgtgagttatctgcaagtcaactcatttcaggagtggaagaatccccggaatgatttcctaatatcaaaatgtatgcaggtttctcttttgaatgtcttgtatatttagagagggtgctgtacaaagtctcttgttttccatacagcaaattccaggatcccttgctggatactgtggctggagcaatgtgagcaacagaggcagagtccgggaggtgatgtggggctggggcactcatcatggccttataggtctgcgccttggtccacattcgtactgcagttattgtttttatttgtgataatgattttatactaaataatggtgatattcctaccatatttaccacgtagtagtgtctgaggtttctgattctttcgaacaaatgcctcctgttgaccctgtttccatttaaccaatcaacctagatttctgctttttgccccttcatgacaccaacacagtgggttgaaattcaaaacaagtggacttcatttcatgatctcatgtgcttcttatttaaacaggaaataggagcattgcatttgacaacttttaactgtgtagccagataattagcttgtgaaaaacatactcagttttacaaacaagttgtgattctggaaagtaaaattagtcrttatagtactactttgcggatttacctcccactgcatgctgttaagatctcatctaagcaagattaataaaaaataaaaaatcttgactaaacatctgttgcaaagtgactttcaatttggctcttcaccatgtgactrgtgattagagtttttggtttaggttaaggggatttgatttgatttggcatggtccctttttaattttatgtatgaggcaaataactgaaatgtccctgattgtcataagtgaaaaaatatcattaaaatatttgaattttgttcaaggagattaatctctataaaycaatgttttgtattccctaattagaattatggtagtcaccagtatgatcaatgctaagtgtttatttggtaattaggaagtgcaagctctaaattttgataagattgatgaaatggcctcttctcatattttcattatgtccgtataaacataacttagaagttggaaatatgaattttgtctacataacagtggacatgctacaacaaacaaatatatagctacaaacaaagctatatatttacattgatatccccttgattatttttctcaatgagcagacattcaagagatttttttcccccacaaaatgtgatgtgaaacatctacaatgtatacttgccaagtgcataactattaacttactccaggtaccagatggtcttattaagatactaattaatgtcaactctgacaagtgaagctaatgtttaaattcagctgccagtaagttctctgtcagagcactcccaatagaatgtgagttatatgcgggcttctagaacaatgtccaaaacacagtgtgccttcgcaaaggtttcagcgaacggataaatactgtggctacattccctttctaggaaataagaattataaaaaatgttgatcttctaagtttaattttattatagtttgaccttacatataagttgtgttttgaaggtaccattcttcccttcttagtaaaaatgtaacagcatccatacgatgtgatttcggctgctccattttattgttgatctacttgttcttcaataatagaactcttgttttataataatttccataccatgtttgttaaccaataatatccataaccataacttgaggcactttgttatagctgatcctgaggttaggaatacttccttgacatgatacatacagtatattaaaccaacattcaaaataatagttaaaaattagacactaaaagcgtgcccattaaaatcacttaagaaaacaggcgcttgctgtcattattataatttgacattaccgtgatagtgcggcctgaggagtaagtctagaagcagaattaagacctacagtgattagaaaagacaacacaaaaatattgacagatgttggyttgatgtatttagaaaccctctccaaagtgggggaaaaatagtttggaagtaataggagaattctgtaggttcaattgcaaaatgtacacatcaaattcaatagtttaccctaatatacaaataaaaatacacaaaatgttcaaagggttatttaaaaaagcactccctccaaaagacacaaaaataaaaggagctgttaaagatccgtatgatgaaaaccacaaaacattcctgaaatggcataaraatagacttgaacaaatggagagacagtttgcatgtctaagtgggaaggctgatattgtaagcctcttcaattaatttaaaaattcaatggaattccaatttgaatcccaataggaccttgtttcagactcaataatgtgtttctaaagtacatgcaaaagaataaattggcaggaatactcaagaaaaatgtgaaaaacaagggtaatgtgaagtaggccttgcaatactgaatagcaaaaccatttgaaagctacaataaagtattaattaaattgaaagtactctgtttctatayaagtgtaagagcaagaaggaatcctttcaaatacaacattaattacatatggcttataggacatggtgattttcagattttcttctttattttaaaatatataaaatatatactttatattttatacatataaagtatatggattttatacataaaaagtaaataatatatgtacattttatacatatataataaatacatataagtatatatactgtataaagcatatatacttatacataaatctatataaagtatactttatatactttgtatgtatagaatactttatatatgtatactttaaacattatatactttgtatactttataaagtataaaatacgtatattttatacattataaatgatatactttatattttatatagtaacatccattcttcttccttctaaattttgacagacaatacagttgtgtagccactaccaaatacaagatttagaatatttccatttccgtaaaaatatttctcatgcccctccatagtcagttctctcttctttgtcactctagtactgccttttctagaacgacataaaaatggattcatacagtgtctagccttctgtatctggcttattttgcttagcatgatgtgttggagattcactcatgtttatttaccagtagtttgttcctcattcttgctgagtactattcatcatgcagatatgccataatttatttgtttatttagtaggtagtaggtgtttggagtgtcccctatgtgtggcaattatgaagaaagctctataaatacttgtatagaagtctctgtgtgggcatatcttttcatttctcttgggtgaattcttagaagcagcgtggttgggtcatgaggtgagtatattatcagctgtatatgaagctgccaaactatttcctaaaatggctttaccattttgccttcagaccagcaacatgagtttccattgttctgcatctttgtggtggttgttttttttttaattttagccattctaataggtatatagttatatttcagtgtggttttaacttgcgtgttcctattgactagtaagatagaccatgctttcatgtncatcttggccatttgtgttccttttttgattaaatatctgctcacattttttgccaatttttggtgggttattttcttcttattggtttttnagagtttgtcatatactgcggatggaaaccctttgtcagataggtgtttttaaaaatattttctccagttctgcagtctgtctttttactttctgtatagtgtcattcaaagaccaaaaatttttaattttgatttaagttcaatttatcaattttaaaattttatgtttcatgctttttgtatcctaagaaatatattcctatgcctaggtcacaaaagttttctatgttttctttaaaaagttttgttgttttaagttttgcatttaaatctatgatacattttgagtcaatttttgtatacggtttaaggtatggctcctttctttctccctccctccccctctcccctcccctccttccctctctccttccctccctcctttgctccctccctacttccctccctcccatcctccttccttcccttccttccttggtatttgggtatccaactgtttcggcaccatttgttgaaagtacagtttgcacattgatccttcttgacacgggtttttttttttttttttttttttttgaaatcagttaaccctatgtgtgcagccagtttgttttatttgtctgtctgtcctttccagtaccacactgtcttgatatctgtagttttataataagtcttaaccatattgagtcttccattccatgaatatggtatattcctccaatttttaggtcttatttgactcccgtgtcaatgttttgtgtgtttcagtatacaattttgtgactttaaaatattcttctgtatatggttttgtgttttattcttcatcaccatcatcatcaccaccattcatttatgtagccagccactgtgcaaatatccttaaatacatatctaattaaacttttcaagaattccagattttagaatcatgatccgagttttacagatgaggaaaacgaggctcagaaaggttaaatagcctgttaaaatttatacagcaaacgtacccttggtcaagtgattattccaaattgtctgcctttgaaacctttactcttgactcctaaactaatttwgtatcatttatctatataacttttgccttaagaccaaaaaatattggccgggcgcggtgactctcgcctgtaatcccagcactttgggaggccgaggcgggcagatcacctgaggtctgsagtttgagaccagcctggccaacatggggaaaccctgtctctactaaaaatatgaaaaattagccgggtatggtgacgggtgcctgtaatcccagctacttgggaggctgaggcaggagaagcacttgaactcgggaggcagaggttgcagtgggccgagaccacaccattgcactccaccctgggtaacaagagcaaaactccatctcaggaaaaaaaaaaaaaaaagacaaagagtattataaactaatgaaaagagcgagggtgatgttgggatccatatttggcagggaagcaagatatttgtactctttcttacaacttccactgtattttgttaagacctgaatacacctctacagtggacagtccaaataaataagccattcccgtacttaagaagcatgcatatggtggagctttatgtgcaaaagcaacaaagccctctagttatattttagctcctcagatacttttctgagtgattattcctgctgcttaaatctctgtactactcccttttgcccaagttaaaatacctaaatcattggttgtagttctattattgtattcagtaatagttcctttgattggaaaagaaatacctcctttttagaattccctggcagtctgtaataactcccttttataatatttgtaacattgtgtcttaattaattgttgtcatataagtcttctcactagattgtgagtagaagctgttttcctttggctttttgagatgtttcatatgtacaaaaatgttgaatcagtattagtgttaaacacacgtacccacctaaattcactacatattaacattttgccatgtctgcattatccctgcatgtgtaaactttcttttctgacataccaaaaagttggtcacagacacagggacacatcattcctcgcttcatgcaactcctatgaataactgctctgtaggcacaggaatattatgatgcctatgaaaatgaacaatgattcccgaatagaatgtaagatctcttccctgtgaggttttccctttgaccttaagggtccccaccatttgtcttgtcaaatgctgtatactctgaatctgtctattcatttcctcatgatggaacatttttggcaaaaaaagtaactacttaagtgatsctgtgtgcttagcattctacctaaaggcccatactataattaggaagaatctatagggtgttgttttcagattgagtgagtgtcttcgtccccaaagaccttttacctcgaggtttcagtgcccattgaggagcctcctctggaccaaccattcctttaggagttgaaaccttcagttatcaagttctcttcttcattccgtgtttttttggctcatagtcttccgtaggtcacagctttacttttgccctcaaccctgccacgtcgcctatatgtctgtgtagacacatggatttttttctcattcaatttgctacatttgtttgttgtcatcgttcattttgatattcagattgtctcaagcatcccacacgtggccaggggagcctccccacaccacctcctgtgtccttttgacatggccccactagcctagaagaaagacgtgacccagcctcccactgaggtcattctggtcaggggctgtttttatctcctgctgacctactcttgggaactcaatgatgtcaacacactgcacactcattgaatgttggttgagtgttgcacttggcagtgctcttcatggttttgaatcttcttgtcattttagccttatcmcctccatttctcatgacccattctagaaggacccatttagggaagcttcaatttcccctggggtgtggggaaagtgagacaaggggtggragtagaacctcagtgggttgtgcttcctgtgttgatgctttcctgcacaccctgctggacaggtacagggctactgcagaattcctcgtgggttcccacaaattgagtctcagtccaccacagtaggcgattttgaaaataagcattaggcatttatgactaaaatcactttggtagcttatgtagttgtaagtagataagctattggatgatcacttgtcatgtgcagygtttgagcatacaaccgcatacaacatatgtatgtattatgagtacatacatatttataagaaataccataaaagattatctatgtttttatttactataatctcatatttcaaagtatcttttattctccttacgattcatttatttaatgttttaatactttataatacttaagtatcatcataaayatttaatacttaatatttaatgatgtgtgtgacatttctccttaatacatcatccaaccaatgttaacaatgttgaggacagtatccttttatgatttatgtaaggcattccattttagctaagaaagagtttcaactttcatttataacaatgataattgtagtgtcctttatctatgaaagtcagtttaaaaacacgtatagacatattgatcttctcttcaataataagagtttttttaagaccgagttacgctcgtttctattatagtgtgttttcagatcctctatatcatgcgataagacttcgaaaattctaaactctctaaggctctattattacgtgatatattgagtatataaaaataacgtataaaattttctgctttgctgtcttgctttaggatcaaatgaattatattaagaagctgcaaacaaagtatatagtcctcattacaccataaactataattttgtatgtaatatttgattataatttatttttatacttcataacaaatgtgaatatgtgtttaaattattatactttataagtagcaaataactgttatgggtaatttaagatccagatattcccttttggtatatttgtccaataaacatcttctgcaattactgccactataaaaatgaaatcgattttgtttttaaattatatttctttccttatagtgcctggaatggtatgagatactagtactctataaattcaactaagcactcagtttaaatttaagatacaggtttaattttgttgttagtagttccaaatagctaaaagatgacattagtgtaagttattttctgttttatatagttttggcttttttttttttttaacaaacattcctcactctaaagttctttataaaataaagaaattgtaatatttgggagattaaatgagtaaaaattaattatatattgaataaaggcatcatgggaatgaattcatytttaaatgaaaaaaggaacaatttcaccatgggttgtttatatgggaaaggttttatgagttcactgatgagaatggrcacccattttccggtgagcttcagttttaacaataatacctgaatcagcctttttattatgtcttatgcttaatcaaatatttaattaataaaacgtgacatactttttgagggcacagcgatgactcctgacattcaatgtatgcggcactgcacactatcctctgtcctcattttacaacatcgttctttctatatttttaattattctttctttcttatactccccgcccccttaatcttaaaaggattttgaggtagctttaaagaaattctatataatatgaaaacacatgtgtgagaaaatcaaagcaacaaggagaagctatctcatttctatttcaacaaatataagtgaaagaacaatgttacaaggattatagaattttgcaagatttttccaagtatgttattattttaaatctgagaaatatgatagttataagggcaaatcgtttgacttgtcctgaaaatcactaagctgggggaggaatataaggaagatatgatgatcatgaatataatctcatatctacctgaggatagtaattatagttctttggctgggcgcggtggctcacgcctgtaatcccaatgctctggaggccaaggcgggtggatcacctgagatcaggagttcgagatcagcctggccaacmtggcaaaaccctgtctctactaaaaatacaaaaaattagccaggcgtggcatacctctagtcccagctactccggaggctgaggcaggagaatcacttgaacccaggaagcggaggttgcagtgagctgagatcgcaccactgcactccagcctgggagacagagcaaccctccatctcaaaaataataacaataataattattattattgtagtttttttacttctcttacattttctaaatgttcttcctttcctctgggttctgtttttgtttgtttgggcctcctttattaatgctggatgaatttttttcacaaggcccagtactcttgctcagaccctctgtctccaagtttgtgcacagagcatggaggcgcatgggctttcctgcatggcaagcctggatgggctgagctgtcatacttttggaacctccatgcttagtattagtgcttatgttctctttggctggtcattttcaccaaagaggattcttctggtcttctttctaggtttggtttgggactaaggttaggaggggttagtttaagcctccttgctgatatgctgggagctgagcagaaaagagagaggggagtatactgtttggtttgacatcaaactaaacaggtgtttcttccaggtggttcttgtcattttcttctgcttttcaggtacctcccttgtccagagagtaaacatgtggtcctctccccaggagtgagttggagagcccctcactggacatgctgggcataggcagactggatatagggtcacatttcaaagccatcagcactgttgtttttcatctcacatgtagcctcctgagtacctggcaccctccagtttctgggccttccttgggttttgcaccagggattcacagacttcctgttaaatgtcaccacgttcttgccttgagggcagttggtacccactcatcaccctctttcctgcttccagaattctcttgtctttagttgcatctcctcagagtcccctggtccttgtgggcttgtgcagttttaatatgtgccttactgtcatttaatgtgaggaactgggaatgcatgttttaaatagtttctaatttgtgatgtaggcaacccctaagtatattttgaaaaacttcagctctgtgcagactttgcaggagtttggggctaatttataacattttgaggttttgtttgttttttggactccctgtttttctctttcatattttctcacagaaaataccacctatgaacattttgccattggctttccctctacaaaagagaaagccattgtgctctgttggccttctatcttatcagctctaagaactcactcatacttggatttatttcaaatcattttaaagaaggacttgactctcagttacattcccttttcctatattctcttcttcataatattgctttacagtattgattctttggcttgaatgcgccccaaaagaaaaatcatccagaagtcatcaccattatgttttttttgttgttgttgtttagtaatatattttaaaatgttactggataattcattttcattgctttttatgatgattataagatgggtttattttcattaatatatttgaaatttaagcatttgagtgagatttcctcttcaaagtccttgccttagtgaaaacacggttaaactttgtaacaagacctcagttgaaatcatgaagcataatcccggattcagtcttcagggttctccttttattgaaaccgggcacctaccgtccacactcgtcactcctgtgtctctgtttacagctccaacagcttctgaggctgggaactgcccagagatcctttggaatttagagaacttagaagaacgttaaaatttctgcctgtgttgtgtgtcccagagagcaaatctgtgctttgtacaaagtgtgagctccagggtcgattgagacagctcttgtctggctgatgaaattaccaggagcaattttataccctgctatccaagtcacatggctaagtccatttttattacaccttcacagctcctcaagaatatgaattaaaaccctttggatttttttcttctaattcatacttagaccttccactaggcatagttgacaaaggcactgtttamaagatatgtctcatcctgagtttccattcaccagtctgtgcttttgttagccttttgtttttatatcctgcaatgacatcctgcattcaacttgcctgtcacyraatgtccccctgctccaccaccagcaccccattctacctgtgctgttttccttctactgagactcacttccacctgtgcccagttccacctgcctttccttctacccagcctcagttctacttgtgctcaattccacctgcccttccttctacctgtgctcagttctacctgttctccatttttcctatcaacctacctagtgaaatgggggcccaaacacatttaaaactggggcactgaggtacttccaggagggctgggggtgtgcggggacgacttctgtccagggctccctccaggagcagtgccaggcagtagccaaggccacaccaacagggggagccctgcgagagagattttttaagacaggagcttaagaaatggaactagatcaggggcaggcagggagagtttgtccctcctgccagatggatccttttctttctggaccacctttaaaaatattaacatactttctctttataaaaacaatctgggcttagtctccctccactcatgactatctggtatcttttctagtcattttttgtttttcttgtactatatattctttatattggtcaaatgtgtatacataattactgcagttttcctcttcaattattttctcatgctattaaaatattccatatttgcataatgtttcwtgatttaatggttgcacaatatttcatcataacacaagttatgattgcttgacttgccaaataaaaatatargacccccagttcagcttgaacttcaggtaaacaacagttttttttttctagtatatgtatctctcatgtaatatttcattgcaacgtttgggacatatttatttttctttgtttatctgagattcaaatggaactgggcatcctgtactttatcttgcaaccctacaaaatatcayattatttacacagtttcttgtggtggatgtttagaattttcagcaatgctatggacatctttgggtatgaaattttctattttgaattacttcctttggtagattatcagaagtagaattacttaggagatgagtatttattttcaagacttttcaaacctatctccaaatcactttttaaaaaggttatagcaatttatgttcccaccaacagcacacaagagtcctcgttccctgcacccttgctcacattatcatcattgaaatacttctttgctattttggcaggcaaataatgatgtatcattttcatctttgattactaatgaggttcacttttttttgttgtttattaggcatttagtgtcctggtttttaaattttctgcaagtatatcctgacttctgtggccccattttgcattgctttgaagttataaggaatatgtcttatttttacttattgacttatttttactcagctgctggtgctggagcctagtccctatgttcaggctcagggatggttctgcacagtggcttttgctcccagcctacctgctagcctacccattgtctagaagataaaagcttcatttaggagtcatctcccaaatgcatttaaaataaatcagttaaagcacagaatagtaattttcttctgagcacacagaattaaagttttattttcacagagctcgctcacttttgttcctaataaatgactggtttcaaaaggcttccataamtacccgttttatccacccttataagcccacagatatgctgcagggttctgctgtgttcatggaaaccataaggcttcatggtatctgcagtatttgcccaaaaaaatactgataacccaaggatgggactccattcccaaagggcagggaggaaggggaggggcatttcagtgaattttaatatgcagatcatccgtttcctaatggagttcatgcttcaccttagagctgaaaaagcaagacttactttcgctaagaaaggaaagactgaacgatgcacatgacttctggaacatttccttaagtttggtaaagagggcacgcacagtgcccggcagcaccgcctctaacttgtggagatggcccatccttctggcccttctgggcctcctgtaattaatccccatcgcagttaaacaaggggccgcgtggttgccttctctgatatgctcttccagagagacttccccacggggcatttacatcctcccaggacttgttttatggaaattgctgtgttcgcttcagtttttcgttttctgtgttacaacggttttggcatttgttgccttgcatgaatttctccrcatgacgtgacagtctgctgcctgaattcagtatgtccacgtcacctgttcacgtcatctggcctgagtctggctgcactgatgtttctcattagtgttactctgtgctcataccctcagcattttgagaccccctcaaggattatgcttttctttctactttcagcctgatcatttaagctaagcacattgatacattgcttctggtgataaatagctgactttgtgatttcatttattctaatgtgtaagtctccattgtgtaactggtttgacctgcagaaaattgatttcagcacctactaggttcacctaggctgatataggcctcttcttcagcgggaaaagctcctcctctcaaggggaagagtccgggtcagcgactgcatcagggtcaattgtgggcagagtacttcgaagcctcttcttcctcaccctcttccagctttctctgatgactgcaagmgtagaggaaagtgaatctctaccttgtgttggtcatcagaagtggcttcagattccttagaggaagagttaaaatgtgcatctggatgaggggtaaagaaatgaggtcagccagtaagtacctgtcttatagtcctagagtacagcctccacacccagctttgccattcactccttcagagagtgaaacctctaagcctcagtttcactgcctgtaaagtggcacaggaagagaaatttgtgtgtgattgaaagaggtcgtattctattaaagtgacagtgttgttattaagacgattatccacgggacacatctcattgtcataaggagtagacaagatacaaaggcagcctttcttgagctgaatggtatgccaaatatttatatgtttcaaaagttcacaaattttgccattttactaatcattgcctcaatggaaaacaagcattatttagctgtttccctgaacaccaacttggaatctaaatctcagcaattatcatcattcacaaataatttatatttctgggcaaatggaagatatcatatcatcattattgtgtttgttcaatttgagtaatgcgtccttcgaggactcatttggaagtagatatgtgtactataggtataaaatggattggagaaaatattggattttaacatttcactgtaaagcctgtattccaaattaatataaaagacatttaggcattctgatatattgctggtaaaaggagagttagtaaaagaatgcaatttgagagctcatttaatagagaaaaaatagggacatgtctcaaagtgtgtttcatgctataattttaccaaacttgtactggcttaatgggaaaaaatatatatcctgtgtttcttaaaatgtcattaacttagggggcaatatttaaaagcaaggaaggctttacaatgttgttagctacaaagcctagcagtgagcaattgcagttaatggcaacagaactgcctagctcacaacccrccaccaaagcaaacacccttcagggcacgcaaacaaacgtgtgcacacccacgtccacacacatactggctgcctccatttgcaacagccggagagacgtttcagctttggccctttaccttccccattcttgattttctgtgttgctttcttttttcctccttcttttcctttccacccagctccgtctggtctgagaaactcccagctctcccacttgacattctgatgagcccacattcctcctgtccttcttctcggggaggagaattgggccataactcattgtggagttgtggtgattgcctccacatcgggcacagggggatacaggctgattttgagaaattagaggcctttctttgccatggcccaagaggagaggctgcacacacattttgccggataataagggcagcaagtttccaagagagcacaaaacagaagttcccatgatttccatcctgtctttaattttcttgtatttaatgcaaaagtatttcaagcttatttttccagtctggacaaccctgtatcaggaaacacttgaggtattaatagttagagagaataaaatacagccctgagtgtgagtgcaccagtgtttctcattcatgttactgtgtactcatgtcctcagcattgtgagaccccctcaagggttttgcttttctttctactttcaacttgatattctaaggaccccctaccaaaaaacattcctgaggttggaagtgacccatgccttatgctgatcttccctgagagaggggcagcagaacccagggctccctgcccatgccccgttgcttctccctgacagtttcaagtcccagaatctgggatgatttcggcttttcccatgagtgttgctctgtctcatctaattctatcttttgattcatttacagggaaacttcgtggcttgcatgacagctattttacgacaaatggaagattaccattatgcccacttgatcaagacttttgggaaaatgaggactgatgtggtagtaagtgtccctttcaccctgttcacataaccaygttttagggccagcacttyagacaaaagcctgatatcaatatattcatttaaaataggattttgcatgagaacttgtctctgattgatttcaaatgcctcctgggaaggtctgactgaagccttgtttctaacaagacaagggtccggacttgcagacttgcttctagggctgaatggagaatgactcaggggctgagcccagggaaatctcttgtctttcttggtgacagtttcttctcctgtgctttgggataattggaaatttggagatgttatccatggatagtctcccattaactcctattcatttattggttgactttttaatagcagaagccagagtgacttttcagctttaagttgtactccattattaattagctgtaatcatggaagctcatcagcatttctccaaataattctctagtcatcctcagtaaaactatgatacaacttaattaggaaaagtataacagaggggaatttattgcttatgaactacctccctaatgacctgaaattacattgccatatggcaaatatcctctgcaaagctgcaaccaaacttgttggcagactttgtgattacatgttgacttgaactctaagattccatttctaaggatctgtaaggtcctgtagaacagggtccccaatccctgggccacacagcaggaggtgagtggtgggcaagggagcattagtgcctgagctctgcctcctgtcatatcagtggctgcattagattctaataagagtacgaacgctattgtgaactgtgcatgsgaaggatctaggttgcatgctccttatgagaatctaatgcctgatgatctgaggtggaacagtttcatcccgaaacctgccccaccaccccctggtccatggaaaaattatcttccacgaaactgatccctggtgccaaaaaggatggggaccgctgtaaaagaatactcatagatacctgcagaacatggcagtgtactagtgtttctagaacaggggttgttgcacttgacatgtaccttattaagaaatgggaagaagagaatgatctgtatgagttttttcaaaggattatttctaatacataattttcttattgttgccactatatatataatgcatagttttcttatatatctatagtggcagcaataagcaaattatgtattagaaatgatcctttgaaaaaataatatttttatacttatatatacatatatatacacatatgtacatatatacacacatatatacatatayacacacatatatacatrtacatatatatacacacacacacacacacacacacacrcagtcgtgtgttgcttaacaattctgccaaatgcatcgttaggcaatttcatcattgtgcaagcctcatagtgtgtacccttacttaaacctggatggtggagcctgctacacacctaggctagatggtctagcctgttgctccgaggctacacacctgtacagcatgtgactgcactgaatactataggcagttgtaatacaatggctatgatgtcactaggtgataagaagtttcagttccattacaatttttggaccactgacatatacacagtctgtcattgaccaaaatgttattacgcagcacgtgactgtacttcaagatttctaaggagaacaaaaatggatctagaccttaaagctctagcagtttcctctaaataaaagtaagggaacaagaatatgtatatgtttgtatttctgtgtctggttttccctgaatattaataagtagttgatagtaggagtatattcaaatgtgtaacctgtatcctgtttatatcccatgactctttggaaatcatggcatagcgaaatcaaattttacatttgtaacattttattccataattgaatctaaactacacccgaccccctgctttggtcagtgtaaagcatagttgtagcttaaagctagaggaacagttttgcagataacgttccaggttgaataataaagtcttcagaaatagaagaattactcacctggaaaagtcaggaytccaattagtactttgccctttttcagaacaatcacttcataaaagtccccaygtgcaaacatgtaatctgaactattaagtgctgtaattgataaggatccttcaaggtaagtgaaaagcgatgatgccgaatggcatttaaaaattactgtagcttgctgaattccaagtgtgtgccctctgtctttgctcasatcccaggatcagatgtttactgtgtgttgtggtcccaatttcccaggggatgtttttccatagacacaacagtttagaaaaatcaatgatttgtagacaatttgacttccattaagaaatgatgttggccgggcgtggtggctcacgcctgtaatcccagcactttgggaggtggaggcaggtgggtcacctgaggtcaggagttcgagaacaacctggccaacatggcaaaaccccgtctccactaaaaatataaaaattagccaggcatggttggggggcacctgtaatcccagctactggggaggctgaagcaggagaatggctggaacccgggaggcagaggttgcagtgagccgagatcgggccactgcattctagcttgggcgacacagtgagactccgtctcaaaaaaaaaaaaaaaaaaaaaaaaaaaaaaatgacgtttgtggttttttataccacaaatttagactggaaagtatgtgaacttttttactgttgttaatctgacagaacttttgtaaaatgtgtttctgtttgttaactataccgagtatatgactgtttttcaactctgacaacgattttttttttgagacagagtttcactcttgttgcccaggctggagtacaatggtgcaatctcggctcaccacaacctcctcctccagggttcaagcgattctcctgcttcagcctcccgagtagctgggattacaggcatgcaccaccacacccggctaattttttttgtattttttagtagagatggggtttctctatgttggtcaggctggtctccaactcccaacctcaggtgatcctcccgcctcggcctcccaaatggcctcccaaagtgctgggattacaggcatgagccaccacgcccggcttactctgacaactattaaataaaagattattttgtacagaattatttgatgttatttcgtatttcaatatgaaagtggccaaaacactttccatttttttttaaattttattattattatactttaagttttagtgtacatgtgcacaatgtgcaggttagttacatatgtatacatgtgccatgctggtgtgctgcacccaataactcgtcatttagaattaggtataactcctaatgctatccctcccccctccccccaccccacaagagaccccagagtgtgatgttccccttcctgtgtccatgtgttctcattgttcaattcccacctatgagtgagaacatgcggtgtttggttttttgtccttgcaatagtttactgagaatgatgatttccaatttcatccatgtccctacaaaggacatgaactcatccttttttatggctgcatagtattccatggtgtatatgtgccacattttcttaatccagtctatcattgttgggcatttgggttggttccaagtctttgctattgtgaatagtgccacaataaacatacgtgtgcatgtgtctttatagcagcatgatttatagtcctttgggtatatacccagtaatgggatggctgggtcaaatggtatttctagttctagatccctgaggatctagaagccacactgacttccacattggttgaactagtttacagtcccaccaacagtgtaaaagtgttcctatttctccacatcctctccaacacctgttgtttcctgactttttaatgattgccattctaactggtgtgagatggtatctcattgtggttttgatttgcatttctctgatggccagtgatggtgagcattttttcatgtgttttttggctgcataaatgtcttcttttgagaagtgtctgttcatgtccttcgcccactttttgatggggttgtttgtttttttcttktaaatttgtttgagttcattgtagattctggatattagccctttgtcagatgagtaggttgcaaaaattttctcccattttttaggttgccttttcactctgatggtagtttcttttgctgtgcagaagctctttagtttaattagatcccatttgtcaattttggcttttgttgccattacttttggtgttttagacatgaagtccttgcccatgcctatgtcctgaatggtaatgcctaggttttcttctagggtttttatggttttaggtctaaygtttaagtctttaatccatcttgaattaatttttgtataaggtgtaaggaagggttccagtttcagctttctacatatggctagccagttttcccagcaccatttattaaatagggaatcctttccccattgcttgtttttctcaggtttgtcaaagatcaggtagttgtagatatgcggtgttatttctgagggctctgttctgttccattgatctatatctctgttttggwaccagtaccatgctgttttrgttactgtagccttgtagtgtagtttgaagtcaggtagtgtgatgcctccagctttgttcttttggcttaggattgatttggcgatgcgggctcttttttggttcyattttcttgagactatttccttttaacaagtactaattcaggttctcaaatttagccctttttggttgagtgagtcattttcatacaaaatcacacttactatcaacaccagtgacagtgagcatatagagcacaagcggaatgactgatccagaagagaaaaacaatagacatgttcagctcagaactctgaggacagagaccatcccaaccctttwggattcgaaccacaaagaatctgtagaatcttctacactggagatgctgacctgcccaagrggctgctggctgccacgtgtccacgtctcagtaacagaagcagagaatgtgccccgattctctgtagtyagctrgaagggaacaatgasggctttggtacttctagcggagaatgttgtcttgccacttgtcacaaattcccactctgtggctttggaaaacacactacattttcctacactctcacacttctgtgaccagaagtgtgtgggtctctcccaccgcawcccattccctgacaccagctggatgtcctacaattcaattcaattctgacaccatctacctggagttagcatcagattctgcaaggaaaagggcttatctgaccttactcagatttcaccagtgttttacttattctctttccactgtggatcacaaaaaattttacaaatacagaaaagctgaaagaataatacaatggagccaggctcagtggctcatgcctgtaatcccagcactttgggaggtcgaagcagaaagatctattgagcccagaaattcaagaccagcctgtgccacatagtgagaccccatttctacaaaaaatataaaaaaatagccaggtatgatagctyatgcctgtagtctcagctacttgggaggctgaggcaggaggatcactttagcctaggagtttgaggctgcggtgagctaagattatgccactgcactccagcctgggtgatagcatgagaccctgtctcaaaaaaaaaaaaaaaaaaaaggaaaccatgattcctgccacctcaattcatccgttgaaagcacgttggcatatttgcttccgtcatgtgtctccaagtgtctctatctatacagccaacccctttcagtcagtgagagacagggatgcacctgccctaagctgttcagcaaacgtctctggggactaaagacattctctattggtcatattgctccatgagaattcagcaacaacccctcatgccatttgtattcagatttcctccattctttccaaatttttttgtccttttcackcattgcatttgatgattgtgtctctttaatctttctttttctaaaataaatccatcaccatcacactgttttattttcttttcatagcattgcttttcagtttytttgaagagaccaatccaytagcttttgtagactatctcccattctggactttttttgtgctgccttgtaatatgcctttcgactggtttctttatccccctgtatgttctgcaaaccagaagcttgttctgagattcaagctcaactccttggcaagagtgtttcagcattgctgtygaaagcttcctgctgtgttacttcaggaagtaacacaggaagtgggcttgtcatgctgacccactactggcgatgctgaatttcaccactgggttcaaagctggtaacttccagatccctccattgtgaaagtatgtacctcttcctacctttgcaattgtcagataatctttggataaaactttgaatccacaaaaatgtggccatgtcctatttccctaacaatccttcatcggatgggttgaaaatctgtggctggtccttgtccataatggttactcctttggctgagcagaatggaaatttcctaagtctaagagtgaagatgctttgtctttagtctaagagcattgggaagccattggggwaatgggttcagtgtgatgtctggaaagcattgatgccttgatgagatttgtcatttgaaaagtgaagcatggggacaagaaaggacaaggatggacctaagttgatggatttggagtcccctgtggcagtccaggtgcgagaggatggctgttttattctagtgggtgggcacagggatggaaaggtgcagacagaggtatgacacgattttgcctctgaagcagatggatggctgctattagagcagcctgcttattgtataagacatcctrtgaatagtcaaactaaaacatgcagccgggcacagtggcttacacctgtaatcccaacactttgggaggccgaggcaggaggattccttgagcccaggagttcaagaccagcctgggtaatatagcaagatgccatttctactaaaaataaaaaaactagccaggcatggtgatgcacacctgtggtcccaggatactcaggatactgaaacgggaggatcacttgggtcccagggttgaagctrcagtgaactaagatcgtgccactgtactccagcctgggtgagggaatgaaataaataaataaaataaatagaaactaaaacaaaaaatgcaacaggaataaatccacattgaatgatgaaattttcacaaaatatcccttgttgacttggagaccctagtggaacagtccggtaagcctcatcagctgctcaaggcaaacacagttgttaggggccaccgccatggctagtgaattatgcagaaaacaaggaygccttgcagaacctcatctcccactagatgcagcattttgtttgatcagcaaagtaccaaaatttaacagctgagccatactaatgaagtatgggactgtgtctcttagaaaagaaagagaattgggaaaatatgcttctcttccagaataataaaaacgagaggctgtagctcaattattaggctttgagaagtaatcatcaagaaagccagcaatttcatgcaaatagagatgtgactgaattacggtactcagcctacaaaatatgcagcctggtcgttaaaatgggaaactcttgacaaagtgaggaaactcagtagtgaaatatgaatttcaataattaaactggaaaagaagccatttgttgtgtcggaagggaggactgggatgctcccgctcctgagagcaggtggacacagtgcccacgtacagagtttggaggacatctggactgacttttccaacttgattttgtctgggtcactaatgtctcctagactggaggcatctgctctaatagagtgatcaggatcactcattttatttatggtgggggcacaccaaactcctcacactacagacttcacctgctaggacctgactttgccattagagttggagagaaagtatcttaactttgaacattagcttgttagtgtcatcaattttaacttgtgcctctttgcaggagctgcttatttagaacttcgtactgggaattgctttcttggctgcttaaattctgttcaccaccttggccttcacagccattgcacctaattatgattcaggagattaaataaatgagaaatatccactcatttggcaatccctgaccatggcctcatttttctaagacagttctcrgttgtcttttcatttcctaccttgagtgttgagtgagcttggggctaccagggatgtgtgctttttgggatagccacttgttttgttcaggttagctcagagcacctgtcaagctctggaaagtaggaaaccttctaattctgatagacacatactggagtccctaggaaccggctaccccttcctgatgtcaggcacattccatggaagcagggtagagcagctgggtgtgtacggaaccctgcttcttttcagttgccctgcgaagtacacagcatcatctaagacatcagaagcataactcggtagcttttggggatgtagctgccatctaggagagtttggcaacacggcygcacactcaaatggtttattgcatgccaaatctgtgcagatgrtcaggagtacctgttggagcctttcgttttgaaattccgtaagagaaaggaayagacagtagtatcccgtattcaatctgatgtgtcctgttcatcatgaaaaattgatttagagcaaacataagaaaaagctgtaacctgcaagccttgtttgttaaaatcatgttttcctagaagcagaaagggcttgaatgcctattcctaacctttggggatttactctttractattagagagacatgctcagggactgtttcagaatatattcttgaagaagccgtctcagacaggaggtgctcaggtaaacagaaagacaggtctaattcacagctcctatgaaatatatcttcattacttttcaggatgtgttcattcagcctttaaaatggggtattttataatctaattgacaggagggtatcatgtttacctttttctttgtgggccatttcagtgttttgtttttttatttcaggatttcctaatggaaacattcatcatgtttaagaacctcattggaaagaacgtttaccccttcgactgggtgatcatgaacatggtgcaaaataagtaagtgtggggaaaacggctctcaccttttctatggctcccaattcatgtctgctgggaacagtggtgttgcctggagaccaagctggcttcaataaaatgctctgcaaacgctgttcctaattctgtgctgcagacagttctagggagacagggactctgagtttgtggtgacttccttatgacaacacagggctctggctctaagaacttgagctccgtcccctggagaaaaacagcctgaagctggatctcccctagctgtcatcatgggcacaggggttctgctcgacgtcgctctgcgctctcatgttacccacatatttgtatcagccctaggcactgtcagctccatgcaagaggcttttgcaaagtgttgacatttcacatatttcagtttttttaatcatgagcattttcttcatactcattaaatattgaacttgtgccttgtttataatctccagtgagggctgttggttaattttctagcacattgggttttatcatttctgtaagcactaacaatgaccatagaattctcaatcacgtgggatttttaaaaagaactttctgttcatctctgtttttctttctcattgcaatttttatggagataattgtgggttcatgtgcagttgtaggaagtcatagagatcttgtgtataagggagtcgatgatgcgattcactgatcttactcagatttcctcagtttaatttgtattcattagtgtttgtgttgagttgtgtagtttcagcacatgcatatactgtggactccaccaccaccgtgaagccactgagtgtttccatcaccacaaatgttcctcttgttgcccaattatagccacatatacctctcccctccccactccaccatccgtaagctctctcgaccactcattcgttcttcatttgtataattgcttcatttcaaaaatgttacataagtgtaatcatacagtatataagctttcagcatggctgttttcactttgcttaattcactggagatccatttaggttgttgcctgtatcaatagcttattcctttttattgctgggtagtgtcccatggtacgcctggaccaagtgtgatgaaccattttcctgttgaaggacgtctgggctatccccagtttgtggctcttacgaataaagctgccaccagccttcgtgcatcagtttttgggtgaacatgagttcgkttctgtggcataaatgccttcctggacaaatgctggcttgttgggtaattgcacatttcgtgacgtaggaaactgccaatctatggctgtaccattttacgttcccaccagccatgtaagtgattcggttgctccgcatccagcctttgccgttgacactgtttttgcttttagccatgctgataggtgtgtagtgtatctccctaggatgttaaattgaatttcctgtgatggctttgcctctctttaatgcctattgtccttcccttcgacaaatccaaagcagcacgacctttcctttggcctcctctgggtttttctgctttctggggcagcagagacagattggccttgtgtaccgtggctgcgggagtcctacaaacctccccgaggggtaagcatgagggagggagtgatgttcaccccgcgtcagatgttactgagctggaagtctccttccacacatcaaagatggcatctgagagtagatggtgaggaagccccggagaccctggcattgctgtagccttagctctggcccggggagcagagtgggggtcttgacctctgctcctcctcactcttccacctgctgggtgactttaaattattcctgtggccttctctcagcttctcagtcgtcatctagaaaatggtggacttaatagaaagcactggtcttttccctttttctctgttaggatgaacttttgtgattgacagtctagatttcctctgaagagctctagagcgttgtgtctttaatggctgtattttgcacatagtgaaaacaagcaaacacatcagcaacaataatcaaaaaccccgctgtcctggagccatagatctcatgacatcattggccaggagcagaggtgtggctgagcaggcgcctgagcacagggtgtggaggcggcccgtgtggatgctgctctccrcctcttgactcctctacgtgtagacctgaccttctgggtctcccagcagagcagcacgtcctggctctcaggctgtggattccgtggccctgggtgagcactgctctgacaaaggtcaggcgggatgggctccctgaagttgcattcatgtcgctcctactccgagggtctcccgtttaggakggaatagtcaaaatctacttagttcatgatttttttttttttttttttataattgagagcctgttttcagttggaacatcatagccgcatcattctctcttcctacttcactgtcttcctcctgccgccaaccctgcgctacgtaagggttgctgcagcactggccgtgatgcaaagccacacagtaagtggtctggggctcaaccctgggagtgctatggttctggtttccttctccagagaccctgtccagcttctcctgggatattctgttgtttctggggtgagcaggtggcttgatccacattccttggaatcatgaatttgctgcaaaccagtggcaaccttccctggccagcacccctactcactagagccccttcacagggtatggcgcctgacagaggtacccgcgctgcagcagcaggttggtacagtggcattttggaccaaagcctttgcgtcttagaaaccgggaagagagtcttttgttttgaggacagggaaactctggggagaagccacagtgctcagtgtcctctcagcagttgattggatgagacttctgaggataaagtctaccttggtgataataaagtccaccttgttctcttgttcatcgtgtacacggactgcagctggaaagacgtcttgacaagggaagcagcctgaatgtaaaatccctacagtttattttctgttttacataaaatgttatcctgaaccttctaatcaaggattccagtactgtgaggccaggtcgttgagcagtgtttcctccatgggagcttcctgcagagaagtgatgtgtgcctgtgtgtgtacccatgctcatctgtgtgtgtacctgcatgtgtgtgcatgtgggtgtgcgtgtgtgtacccgtgctcatctgtgtgtgtccctgcatgtgtgtgcatgtgggtgtgtgtgtactcgtgctcatctgtgtgtccttgcatgtgtgtgcgtgtgggtgtgcatgtgtgtacccgtgctcatctgtgtgtgtgcatgtgggtgtgtgtgtgtacccgtgctcatctgtgtgtccctgcatgtgtgtgcatgggtgtgcgtgtgtgtacccgtgctcatctgtgtgtgtgcatgtgtgtgtgtgtgtacccgtgctcatctgtgtacctgcacgtgtgtgcatgtgggtgtgtgtgtgtacccgtgctcatctgtgtgtgtgcatgtgggtgtgtgtgtgtgtacccgtgctcatgtgtgtgtacctgcatgtgtgtgcatgtgggtgtctgtatgtgtgtacccgtgctcatgtgtgtgtgcatgtgggtgtgtgtgtacctgtgctcatctgtgtgtgtacctgcatgtgtgtgcatgtgtgtgtgcctgcatgtgtgtgcgtgtgtacccgtgctcatctgtgtgtgtccctgcatgtgtgtgcatgcgggtgtgtgtgtgtacctgcatgtgtgtgcatgtgggtgtgcgtgtgtgtacctgcatgtgtgtgcatgtgggtgtgtgtgtgtgcctgcatgtgtgtgcatgtgggtgtgtgtgtgtgtgcctgcatgtgtgtgcatgtgggtgtgcgtgtgtgtacccgtgctcatctgtgtgtgtgcatgtgggtgtgtgtgtacctgcatgtgtgtgcatgtgggtgtgtgtgtacccatgctcatctgtgtgtgtacctgcatgtgtgtgcgtgtgtgtgtgcctgcatgtacccgtgctcatctgtgtgtgtgcatgtgggtgtgtgtgtacctgcatgtgtgtgcatgtgggtgtgtgtgtacccgtgctcatctgtgtgtgtacctgcatgtgtgtgcatgtgggtgtgtgcctgcatgtacccgtgctcatctgtgtgtgtgcatgtgtacctgcatgtgtgtgcatgtgggtgtgtgtgtacctgcatgtgtgtgcatgtgggtgtgcgtgtacctgcatgtgtgtgcatgtgggtgtgcgtgtgtgtacccgtgctcatctgtgtgtgtgcatgtgggtgtgtgtgtgtgtacctgcatgtgtgtgcatgtgggtgtgggtgtgtacctgcattgtgtgcatgtgggtgtgcgtgtgtgtacctgcatgtgggtgtgcgtgtgtgtacccgtgctcatctgtgtgtgtgcatgtgtgtgtgtacccgtgctcatctgtgtgcatgtgggtgtgtgtgtgtgtacccgtgctcctctgtgtgcatgtgggtgtgtgtgtgtacccatgctcatctgtttgtgtacctgcatgtgtgtgcatgtgtgtgtgtgtgtgtacctgtgctcttctgtgtgtgtgcatgtgggtgtgtgtgtgtacccgtgctcctctgtgtgcatgtgggtgtgtgtgtgtgtacccgtgctcgtctgtgtgtgtacctgtatgtgtgtgcatgtgggtgtgtgtgtgtgtgtacccgtgctcatctgtgtgtgtgcawgtgtgtgtgtgtgkacccgtgctcatctgtgtgtgtacctgcatgtgtgtgcatgtggctgtgtgtgtgtacctgtgtgctgaggtgttggtttcaagtaaagacacttttatttgcagagattcttactctcagaagctcaaacaaacccatattcctatcccagttgacacattcagcagaaacaagctcccaagcccacacagcacaagagtcagccaccgaggaggcattttaggtcctgattggagttggtcactgataactgtwacttttattmccacatccttctgcccccatatgctgccctttgtgttgaataaacaacatgaatgtttagaagctggatcaggtgggtttttgaagaaggttattgccttcatgtggtaagatacttgaaactgtctggagacagcttgttgagagacccttaagtattctttgacacctttgcttcaataccagcttcaaaatgaagggtttgcatcactttccctgtacattcccattctttgtgaggcattgcacgtttgcgttctggagctgagagtgagctaacattgggcatgcctcccagcaccaggcactgctgtggggatgtcacgtgccatcacgtccttcataccctcagcagccctctgggacagctgctgtgtttaggcccactttacacatgggaaaattgaggcatggaggttgggtcacgtgccaaaagacagagagctgggcggtgttagtgccaaaatttaaccccagagcatccaccccagagccgtgcctgagccacctagctaccctgcctcttggtcttaagtaggtctcctatttcccaagagagtgttaggagtttttgttttgtctttattcgagtgtccataaaacataacaacttttccacaaggtttactgcttacgtgagtgaattttgagtgtggaattcattacattgctacttactttcttcacctttagaagtgtatgcaccatttatcaatgtgttttataagagcgaatcttactgtgcagtctagaaaaatcacgtctccctagcattgtcataaagtaatcctcttatggaaattgcagataccatattctatgtctttatctacctgccatatatgtgtatatatagwttgcctcttactagattaatattttatgtgttgccagacttccctgctccctccaccccttaacaagtaccagagacttccttgcctcggctggaggagcagtggttccagaagcttctggagtctgtatttcagttttaatggcacagctggacatgtagttttaccacctacggcttagaaatggacaaaatcagcctctgtggtctcttatgtatttgtgtgcttgtttgtctttgtctctgtgaacataccttttctcgatacacggggcttgtaaaatgtaattaaagacaatgtctattagttttggtgatataacttgtaaatcaagaatcaaaattacaggatttaatgactatcccaaagtacggtgttcacttggttatgtccaagatgggaactgataggcgatggcctgacattatagctgtgctctaggatatgagagtaccagatggcaagatgacatttaagatgagcacagcacagaaacagtagaagtgtgcttttgtgctagcacccagaagtgctttataatcttcccagaggggagcagctgctaaggtttcactgaagctctcaggttctgttggaagcacagacctttccctgttggcacctacatgctggtatccatcctggaactcttattagctgacttgctcggattcacgctttgtgtgtgcagcatagtctaaatggccagcaatcataccatggctatcatagaattctccttggttgttaatgagaatgtgaccacttgcttgaatttttgtgtctcttctagtcttagggtttgccttcgtgctccagtagggtgcttgagtttatgtactaataacccctactagaattttaagtgataggaatgacctggtaggaagtgagtctgccaggtaaaccgaatccctttgtcacctcgaagaaaccgtttcttattaactgctttacttttgcttgagaaaggcatttctacaacatgtggtgggtgagagagagrccagtactgaatgtaattttccctattttggaattagactttcttgttcgtattgactacatagcgtgtaacaaaaccttatccacagttgtcagctactgagacttgtaacggaatttttaaaaattcaactactccagctcacagcttccctagtcctccctgcctactgtaccctctgctctcaggataataaagacatgaaaccagcatttgcatttcctcagagctagtgtagtttgcaactgtgattatcaatcgcttccaggcattcctctctgttggcataggttttgtgtttgagacttcctgttctttttcaggctaggctgggacctacgggaaataatgattagtgttttgaagcccacacactttcatagaggacttggtatgtcttgcaagtaaaggttcatataacatgaatataaaatagaatatgtaaaattgtagagaaaacgatgctttctagaagttgaaatactcaaagctgactgcaggataaaacataaaggcaaataagacggttgccgggttctcactggttggtgaaaatgatccttgccatttatcacgggaagctggcagtttacaatgtagattttttttttttccaagacagggtctcactctgttgtccaggctggagtgcagtggcaggatcatggctcactgcagcctttaactactgggttcaagcaatcctcccagctgagcttcccaggtagctgggactaccgacacataccaccgtgcccagctaattttttgtgggtttattttcttggagagatggggtttcgccatatggcgcaggctggtctcgaactcctgggctcaagtgatccacccgccttgtcctcccaaagtgctgggattacaggcatgagccaccacacccggccatgatgtagatctttatataggagacactgaacaggagaagatcatagggaaggaatcagttgagaattcaaaattctgcccatagaaaacagaagagattattctctcagttaggaaatgcgtaagatgttaccagtcagcatgttggttataacagtggttggttataattggacttgtctgaaagactagctcatcaaatgaaggggatttagctgacctgatccattcagtcttgtctagtcgttgaccatttcaacatcagagattgtcagtcaaaaactattgtttggttttgttctatctgcaatcaattaatcttatacttgtcctttcaaactttgaaatttcatcccgatttggagtttgtgagatcatgttgctatttatttccagtgtctgtgtgttacacattaaaaaaaaaaaatcatggccatatggagaccatcccaaacagatcaggatgatgcttgcagtctgcaaaggatggaggattttgatctcttgacctcattttgacaaccaccttggctcatttctctgtggcctctcctcctctccccatgattcatccttctttcaaccaggaagtgttttcctcaatccattgacgtagcatattacattttcaccagcctgccatatatgatgtctatggacacctcataatcacatgcagctcctttcatgaggaaaatcgtccatgcttatttctgtaacttaacaatttctccctttttaaatagaatgcatttcctcacttataagtattatctaccagatgtatcagagtccaggatggcaagctctctgctatttctgccaaaattaatttggcttatagtcaggacaggaaagggccttaagccctagaaagggattccaccttggagatgccagttccttaaggataagtcgtgttggtgctcagaaggcaaatttgcagggtaggctgtttgcaggtactttgccatttgctttcgttgccgtgaaggaatttgagtcgttgaccacactgagctgagggcttggatcaggggaaaggcaccgcttgccttaggatgggagagagggaaaaattagtgcccacgtgcagggggcctgcccccaggaccatggcaccagtggcaacctgtggatggccaagtcaggaggactgcktgttttctttcctgttctacctccgtccagagaagcacctctgcatcccaattaagggtgcatagttgaatattctttgtgcaggttgaaatcatggttataaagcatttggggcttgagaaactcttggattattacttcttaacatcttttttcctttctttgaagcctggattttagttgatgttgtgacttctcatttaatttatttttaatatttattggcttactattgaggttttgcacagccaatggcttgatgattttaggcacactttagaattatttttttcctttgaaacagtatacagcagttgttgacagcaaaacacaactagctaagtaccaaaacacacacacacacacacacacacacatatatatagactgtactgactatacattttgctttgcactgagagatgtttcatgcataaaatagagagggcacttggctttggtcctcataacatgaagtgcctcctctggcattaagtgccagtggaatgtggcattaacgccagccaggtgctcacgatgagatgtgcatggtctctgagaatttggggtgaaaaaaatagcaattgaaactcagtatagtgaaaacattctggaatgaagatttccctagagttctccatacctgcattttactacagctcatgcacttaataatattgctctttgagccttcttcctctccaagaaaactggcctaacctgagacatttcacagcccagagtccccagtttgcaggcaccagggccacagttctccttcctaggctggttaacttgggctgtacctgagtgcatttctggcaagtcacccagagaaacacatgagacttttctgggggctgtgttggccattgtgatgcatcaggatttcaagacagatactgacttggatccagtaatgatgctctggaccctccagcaggaaaaggaccccactggggctacattgctatgtctatcattttagttttatctccagaggttgcttttagaggggacacagggacattggcagttctctctcagcagcttttgggcctagatatggttgcagatggtgtatcagarmccactgcaccttgggatggaaactgacctacgaccaaatgctacctgttcgagttctgttcattcttaaggcctagtcataaattatttcagatactttccrtaacagttattctatttcatgtctgcttttgctctttgcttaataactaaaacaaataatttccagagttttacctggttgtttataaccaatgtattgcacatagcctagatattttaaacygtgtcgtcttattcagattgcctgttttaaattttaattcagagatgaaaaatcaacctactctcaaaggagtggcagtgatgaagagctctcagcaggactcttatttagggaagcttgctttaaaggaaagtttgaaaagggcaaagtctgtttaagaattctcagagatcacgcgcacctcgtcgggagtgcctggctggtactgatgccgcatcccgctggcacttaatgccggaggaggcacttcatgttacgaggaccgaagccaagtgccctctctattttatgcatgaaacatctctccgcacaaagcaaaatggaggagatacactttattatgatcctcctcccggtcctctcatgctaagttttaacctcctgtgctactgggacttggaagaaggtctgtgcagtataggaccctctggtgtggtgcttttacgtctagaacaggaggaagaggcagccaagtgaactgagtcctcgcaggcttgccaggctgtgtcttccgtgtctttttgatagttctcaatgaaggacagttgtttcccctagaggaaaatcgacaatgtccagacacgttgttgtcacaacttgggaagagagggctgctggcatttagtgggtagaaaccagggatgctactaaacatcttttcatgcacgagacagccccctgccgcaaagagtcatttcatccataatgtcactagtgtctccatgtgatagatgaaaaaacagagtccagagtctcagtgatgctcagtaactgttagaaatacatagaaatatgtgtgcagtggctcatgcctgtaatcccagcactttgggaggccgagggagttcgagaccagcctgaccaatatrgtgaaaccctgtctgtactaaaaatacaaaaaaaaatcagccaggcatggtggcatgtgcatgtagccccagctactcaggaggctgagacaggagaattccttcaacccaggaggcggaggttgcagtgagccgagatcgtgccactgcactccatccagcctgggtgacagaccgagactccwcctcaaaaaaaaaaaaaaaaaaaaaaagaaraggaaagaaagaaagaaatatatgtgatttattgcagtgactctcttctccttgtttccccatttctcagccacccttctctgccatgtgacctcagccaaaccagcgccctctagaacaaataatagcagctagctgctgaagataggactggtcttcacttattaggggggtgtccgagaattggaggtggtttccccaagtcgctctgccaggggctccagtgtctttgcaggagatttttgtgggctttgatttggggtggtgtttgggagcaagatggcattggaatcacagtgacatgaatgtacatgccagggctgcctccagtcctgcctggcatgtgggacacacgttgaaaatattagcaagagcctgttctcagggtgcttgggctgccagcctctacaccccaattctgccgagcctggggtgaaagagtagccacaggcctttcctctctacctctcccagccagaggccaccttcagtacaagggttggaagctgagccctggagtcagtttgtcaggtcaaatccgtgctccaccacttatgagctttgtaaatttagtgttgggcagatttaccccgtgctgtagtttcttcacccgtaaattagagacagaagtcaagcctcgctggagtgttttgggggaataaatgagaaagcgcatgtggggtgctttgttcagagcctgacctccagtgaccttgcaacaagccatgtctgtgaccccctccatttttatgaagatgacatgatagtgtgtcattgtccctctgaatctgagaattgagcccacaggtaagggtgtgaagcatagacattgccctggagattcagagcactttgtacatgtattgagaaattacattataaaaaaatacaattctttgctttcatagattcactctcttcttgtgaggatatttgtatatattcaaattgcggtttcccttgatttataggtaattaagtcaacccattttgcttgctgttttcctagaagcagcatttgtgaattgctttatgtgacatggctgacactctgtcaagcataggtcttgtgcagttgtctctgttcagaagccagtcaccaaaatggtggtcctrtctgccctggcatcttggaaggacagagctgcagtccccagagaggatcctgtgttgtccctcatgtgcagatgaggttctgagattcaggggggttgaatgagtggctccgggccccctgtgtgagtagcaggagagactgcagaactggttgctcttaagccacatccaaggccaggcacataaaatgtggacagtgacgcccaccacccatgcagtccttgggaagccccgttggcataacgagaatagagagcttgacgaggaggtcctcagtgaatgaatgccagctcctgaccacgctcagttttggtaacagtaagtggcactgtctacagagcctctcaggaaccggggactccacctgcctcctctccttctcccaccctcagagccaatcatacacaggacccagtggataggactggagttccggaagccagctccccagcgcctcctccgagctgccatccttctctcctgtggcaggggtgtcttcctctgaaatcagtgtccatctcagtcctggccgcacctccacaggctcccgatgtctggcaagaaaagctaagcagggacttccaaacgtgtttgaacaaaactccaatgaagaaaaacatttccaatcactgctcgatgcacttcccacccccatcaaggtgtaactcagcgagaattccttactgtgcagagccctccgatgtttttattctgttctgttctgttctattccatcccatccattctatcccttttcacttaataagtaaataaatacaatttcrcattcttcccattctattgatttcgtgctccactgaatgaatcacagctgatgccagcctgtgccacccagcacagaaaatgccacatggctgactttcctccctccctccctccctctcttccttccttccttcctctttcccagtgtccttgcctgtgtgtggcgtggtcattatttttcattttagccattctcatggatgtgcagtggtgtgtaggcaggggagctgtgtgtcttcagcttctgtaggagctgccaacttcctttccaacaagacttcasagaaggcttcactgctgtccagagttgttcattctacctttttacacgtccctgtcccccaagcagtgttcatgttgctatgcagcctcagtcatactttgtaacatcagactgatttttctttatccagtctggtggtgtgtagtgagattgtgttaaactcgcctttccttaatatctgattaggttgagcacatttttatttttgagaaattatcattattttctcttgtattcaagactcttgtcccttttttctatgcttaacaaaagttatatatgtgtgtatgtgtgtgtgtgtgtgtatgtatatatacacacacacacatatataaatgtatctgtgttctagataagatccttgggtcaggtatctgtgctgtagatatctttctccactcagtgactgcaggattttttttttgtcacttaatagtgttctttgttggatgacatttaaaatgtcttttgaagacacttgcagaaagaacctgaatggactcacctgctggtgactgtctgggtagcaaggctcagcatgcttgctatgtggaagcttcacgaaatgccgtttaaaaaataaaattatcttcaaaaccaaacatgcaattccaccattctttgtcaagctcctgctattttttcaacacgaaattggaaataaagttgaataatatactttctccatcttcaagaaagcctgactgtgatatacttaaatttttaaaaattcacttatgtaatacatcttcaggtctataaaaaaatgataatgtttaattgtaatttttccatggaaccgaaatgttaacagcattgtgacattttctatacattgtttttcatgcaagacccttctgtgtggcacttaatatttgtcatgtgcgattttgtgcatttgtgcatgggtctttggcactgggggggatatctcttctgaacatttcagtggctgcactgtacactgtcccattacccaacacacagtaggtgctcaacaggcagtgactgtgtaactgctgggctgaaagaaggtgtatccctaggaaatgttctaggaacaaagtgaaccaataaaatacatgaaatacttttgtagcagttcattttggagaataaaaggcagttactctttttatatttgagtccacaaagaaacaattgcagctataaatatgcagtgaacaaatacctcttattctctttaagatctwttagccagagctaattccttaattgaatgttgttctaaatttaccaccaaaatgcatgagggcgatctgtgtttgtaygtttcagccaactgcatgacatcagttccatcacaactgcaggagratggaggaaggctgctgtgcacgattacttgctgttttgtggtcaacctttcccataagacttcagagaaggtttttacttaatactgtacctgtcaaattcccagagctgcaagtaaattgaagatacaaattatgttgtaaagtgaaatattttgtgttattcgcgttattctgcagtttggttgatttaggaagaaaatgaactctgacagcttgatcttttcagttcagtggattctaatgtttcaaaacaaaagacctgcactgaarcctctttcctccatgctttggcagagacaccactgtgagctcttcttcatgctcaaacctcggcagctaccggctccatgtcatggacacacagagtcctaggaagagatagattctgctaaatgctaatgtttgtaaatataaatattaaccataccccraaagggaaggagttcttttgctggctgactgaatgggtagcttttagcacctgccacttttctcarcatgcaatctattttttatagacagaaaaaatctctttttctagyttttctggtttgctgctgttgcctcagtgatattgcttgggatgcagaggtttggcaaagaggttggaggagcacccctgcattagtccgtgttcacgctgctgataaagacatacttgagactgggcaatttacaaaagaaagagtttattggacttacagttctatgtggcttgggaggcctcaccatcatggcagaaggtgaagggcatgtctcacacggtggcagamaagagaagagagcttgtgcatggaaactcttctttttaaaaccctcagatcttgtgagacattcactatcaagaggaacagcacgaaagacctgcccccatgattcaattacttcccaccaggtccctcccacaacatgtgggaattcaagatgagatttgggtggggacacaggtccctcccacaacacgtgggaattcaagatgagatttgggtggggacacagccaaaccatatcaaccacctttcctcttctgttctgtggttatgctagacggcctcaccttcttttcttattcttattcaggggaaaacactaaagtgaagtttcctgcaagagccagaaaatcctaagttaacaaattgaattctgcaactgagatgcagtgggtggatgtagggctgggctccttggaccgaggctgaaccataaatacctcccactttggtattgctttgaggagcttcccagcattcacccttcacccttttgctgtgtgccttcctttaccttagctaaggaagtctaggcagctgtgcaggatttgataggtggcagctttagctcagactctggaagttccctgctccctgctaactccaagctggctccttgcagctgtccccagtgtcccttggactatggggccaggcatctgatttgattcttcaaactgaatgttactgcttctactttatttaagtaaatggccatctcattgccatctgatgctgtagcatactgtgcgaaaggtattttgaattagctgttagcagctgggtgcggtggctcacacctgtaatcccagcattttgggaggctgaggtggccagattgcctgagctcagaagcttgagacaagcctgggcaacacgacgcaaccccatctctactaaaagtaaaaaaagttagccgggtgcgatggcaggcacctgtagtccagctacttgggaggctgagacaggagaattgcttcaacctgggtcgcagaggttgcagtgagcggagattgcgccgctgcactccagcctgggttacagaggagactgtctcaaaaaaaaaaaaaaatagctattagcctgcagatgatttggatatgggacctaaaaagcaagctgattaattgatagatgtatttatttatgatattcagcctgagaattaagctggatttagaataaagtgtttcttatgagatacgcttgggggtaaacatgatctgcatgtaattcacaggtcctggcatttcagagcagtattcaaatgcatgtctgccatggactgtgagctcccaaaaaaagtgcatgatgaagtgagtttcgaatactgacagaaacggtagagaaagggcatgtcctggtcctggctaccgttgatattctgcttggagcttggatttggggttgtgttttagcttaaagaaaccatatatacctccartgagaaagagacttttgggtgaagagggactggagggaacccatggaacagaacaaaggctgggcttacggtgatagcccgcattcatttagagatggaaagttgctggaaactttaaaacagagcactgctgtcactgcctgatgtttttcagggactgtttgggccactgtgcagagcacagggagtaggagatttgtgtgcaaactggagggccagcgagagccctggggataagctacaccagcgatggccatgtctttggctaaggtagtcattgggaagagggaaacaatgagagatttggggcatgttttgcaggccacatgaacctgtacaaactagatgtaagaagtgaagaaaaatgaacaatcaaggaaaagtcttaatatttttggcttgagccaaaagtgattggtggaaagtttaaagataaagaagcgggcttgygaggtgggagtgttcccgagctctgttttggcctagcgcagtgtttctcaaccctgtttattttttttcccattatgaccctcctaaggagagaagtaaattcactttaattaagaagagaaatttaatgctaaggaataagaatttgtggggtagsgtgtgctttggaggaccacaagcagaataatatctaaaatgttctttaccctcctcccaagaatcaatttcacccccttagtggagatgtttcccccagtgtggatgtgtggcctggttaattctcaggtgcccaggaggtggcccaatagagaagtttagctagcaactggaaattctacactgacgttcagaagaaaggtaaggctagaaggtacaatttgggatttagatgatgatattcaggccacctggggggcagtgtctctagggaagagaagccgacccaggctaatgcctcagggctctttgatatctaggggtttagcagtggaagataagtcagcaaaggagaccaagagcaggagtcagtaataggaagaaaaaaaaaaacacaggagagagaagacagtgctgaatttctgagagagagcatagaaattaacagagaagtaaccaaaggatttggccacatagtggtcactgctcccatggaccagagctgcctcagtggagtggagtggcagaggaggaggccagcctgctgtgcggcatggaggaaggcatggaaggaggtaggcaccctggctgtgggcgttcattgggttttcatggcgctcagggtcagacagatggtgtgtcgggagctgtgataccaggagagtttgtaggaatttgctgttgatttasggcatgttgggaacactggtggagatgagcggatgatgggtgaaggtggaaacgctgggatggaggaggttcatgagggcaatgagttctagatgaaagggatggtacaggaggggctggcctggagaggagcaaggtcaggtgatttgttgcaacaggagaggacagagggaggtacaggtgtcaacctgtgtgtagatgtaggtggtggttggatgatggaaaaaaacccatgtgacttctgctttcctactgcagaatgaagtcaggtaattagtgagaaggggtgcagagaatagtcaaatattatgatctctatatctctgtgatggccatattaatatttcacctttcaccaatttccccgctaatgcccacgcatggcgtacaggccgcgttggagatccctgcggctcatgctgccttattacgtaatgccctggagaggcctcacaagtagaagagtctaaaacgatagattgctttaaataactcatgctaaatcatcctcctgtgaacatttctcgatggatcttgtcttttaagcttcaacaaaccctattagccatcaaaatcctccagtctctcaaaatagccctcatcagacttgctcccacatgcttgcgtcatggctgggtggccactggagaggttgggtggagatgctggctgtgtacataggaaccagagcccctasagagatgacttgtgtctgagcaccattcttaaagctttccaatacatgggctgtcagtggctgtatgcatcttctctgtttgacttggcttagggatatttgggaggggacaggggggacaggcagcattaagcatccttttgctggtcctctgtctttgagtgcagttctgtgatactcagatgtcttccagaactatcggctgtttgattgtggaaattcctggaagacmagggctcctgttccttctctcgccacccgtgctttttgtctttctcaccctctgttcctttaagaccacaaagcagggactcggacactggtgacacggacatttcaggctctagctgtgggacgcttcaggcaggcagcctgatcttttttccattttgtttagaggtatagattgtacacctctgctccgagctcctttatcaggccccagaaatcatggatgcagcaaaaattttgaaaatgaaatttttcctatattatcccaattactctttggtctccatgaagccattgtttttccaattcctctattgcagaatgcatgcagggaatttagaaatcacatggtaaacgttatgggccatttcctattgctgactttaccttcctagttcctcagagatgtaagatgaatgtccctggtgccagtgagcagccagtcagtgtgcacagagctggaaaaactaatagactagatgcatcttactgatcacgttgatgtggaggggcctcatctctctggtccagctggaaatgtgattgctkcctggggtggccatgactaagggattcctgtctcagctgcctctatatggagaactgagctsaactggtaaacgctcagtttccctttcagaaaagaatgttactctcaagagcagcagtgattcaaatggccttttgactttaaaaaattctccatttaaaaatgtagaagcattttatcctatacaattataaacattattggtagctaataaaaaattttgatgaggcagcagatcattaagaaaatacatatagaccttgcacacttcattttgacttccaatagataaatagatccatttcacaaagcatgtgcatttgtcaggttgctttttcttggttttgtttttttatttgacttaagatagrtctatagatgagtgtttgccttcgttttctgtgagccagttttcatacctttaaagttgaataagggctgggcatggtggctcacacttgtaatcccagcactttgggaggccgaggcaggtggatcacctgaggtcaggagttcgagaccaggctgaccaatatggtgaaacctcgtctctactaaaaaatacaaaaaattattagctgggtgtggtggcgggcacctgtaatcactgctactggggaggctgaggcaggagaatcgcttgaacctgggacgcagaggttgcagtaagccagaactgtaccacggtactccagcctgggtgacagagcgagactccatctcaaaaaaagaactgaagacaatcgatgaaacgatttgaacgctttttagatttagtgagtcttttaagttgtctctcacccatctgacttgacagcagtttttcaagtgagtcatctttttaatcttttcaaatctttagaattcgttttcatgtaaaagtcaactttcttttcatagccctattttatataatatttcattaaaacagttataataacagatttatttggtataaagcaggtatggagcacgcacacagctgtgtccactcactaatccatgcgcacacgcttccctcttagctgtagacaccacatgatcacatcactaggggagctattcagtggaaccccatgctgtccttgttaggtggatttttaaacactctgttaaactaaaaaagtatattctcactggccagtgtccagtgtaagcaaatttgcacatggctgtcccttgagtcactgtagttaccttttaaaaggaaagagagggaaactccattgtgtagatctttccccagccaagagaccgttagcatgcggtacagtaaggcagccactcattaactgtttgtttacctggcaaagagggcaggttggtgagctcccaggtcctcagaaaatgagactaagttttattaagatctgaggggaaaaaaataaaccaagcagaactagaattcactggaccagaaggttttgttctcccttttccagctaatctctctcatccaatctgagagaattaagcaagggtgagggagttgcagctggctgaattcaggaagttaccaaagaaggctgatttaactgaaaagacatatattcttcccaaagcccaggctattgagccagagtacctgatcacccagcaaagcaccactcaggctgtgaggctggccacgcacagggaggcaaagagaggaggagagaggaacttaactttgtttttcttcaaaaagatgtgttgtttcttggcaaaatgtaatcaccattgttagcaaacccatgagatgctctcagcaatgtttatcaaatagaaagagcttccttctgtgtgacaagcaggggatcagagtgacagtgtttagatctgttacttacaaggtgataggggcaaaaattaatacctgcacaggctgactcctgaagtcttcatcaccagaaatgccagcatgatgtccaggccctaaggtgcctaccatgtccccatgagagacacacagtgccatgaacagtctgggttttccagaaatacttgatttggttaattgacaaattctgttgttcctcctttatagttaattaataattttccagtgtagcgtttcctatcagggggtgtgaatccacacacgtggctttttcacaataaaatagcattcatggtgccttaaaacagcttgaaatgccccaaattactagacttgtaggtggatttctcacaaattattattaaaggtaatgaaaatcaaaatcaaagcatttcatatttattgtgtctttagggcaggccatactttacaagtaccattttaagaaatcctctcaatagccataagagggcaggtcatatgatctttatttttcagttgaggaagctgaaggcaatactgatttagtatctcacacaaggtcacatggctaataaggcagagaagaatcagctttgcttgactccagagtccgtgttctgtatagacaaaggcatgaggtcatccaataaggtaatcgcttggagaaacatttttccctacttgttttgatgtagaacttctgtaccaattgtaaccctctgccggttgagtaaatatttggggttaaatataaagctgaaattcaaataaagaaacatgttactgttctctacagggctggtcctcaccttttcacaacgcactttggaaaaccagcacagaacaaaggcccctcccagcctggtgtattcagacctcagtgctttgcctgggctgcagctctgttgggaaaaggtggcagttcagttcccgaggctggtgccctcggcaagaatgggagagcctggtaatttataaaggattatcacatgcaaagkcaatgtttgttttattccatcatctctcattctttcaaagcagtggcgttttcttagtatcgccatgtaatagagttcgagaaaagtgaccttaaaattgaggcaagtgtcacactttgagaatgcattaatttttttaaagacattttagtggttttaaaattttatttcatatatatatatatatatatatataatttttttttttttttttgagacggagtctcgctctgtcgcccaggctggagtgcagcggcgcgatctcggctcactgcaagctccgcctcccgggttcacgccattctcctgcctcagcctcccgagtagctgggactacaggcaccygccaccgcacccggctaattttttgtatttttagtagagacggggtttcaccgttttagccgggatggtctccatctcctgacctcgtgatccgcccgcctcggcctcccaaagtgctgggattacaggcgtgagccaccgcgcccggccttcatatatttttatgttgtaaaaaggggaaacctttgttctttgagtaaaatgccctggtagtgaacattttttaaggttttttttattttgacagacatacccacatttcacgcagcatcatgcttacccattcacctcatcttgcattcagagagctctcaggcacttgcaaaattgaaggccagaatgaagggagctcagtcatccttgacaactgctggggacaaagttggcaatttgttcattgttcttgcaagcacttagcctcttgccgagcactttaacatcagagaattctgggcatagatcagaaatcagtggctgcagaggcaagctacgtgcaggtaagttaagggcttactatagaaatgcaaaatgccaccattcttcactgtgttctgagaggtttcatactgttgtcgacacctgtgctggtgtagaattgcagatctctttctgtcttttttttgttgtttttctccttttcattttttcattttttactccacgctaagaacatcggaatattttcaactttaccattggtaaaatagtgcaaaggaagtgaagatcacgtcagcccatggtccatattttattccttgagttarcaaatcaccaacactatttagtttagcgagttactcctttggaatttacagtaaagccatatttaatatatttccatttagcaagtatttgttttaaataacagccttggcttccttgtttggtttgtgagggagactttgcttctgtgtttccaacgtggctggaagtggaggctccagggctttgcctcactcatacagttttatttttaaattgaaaagtggayttgtttaacatcctccaagaagcaaactcataaagctcgggctttcctaaaatgcattgccaaaatcataattggtagaaagttagcaagaaagaaggattagctcatcgagccgtggcctagcaaattgtaatgggctcaagtagttttgtggcttgttgagaaaatgatacagagtttaggaagcagaaggacacagcaatgacacaggagagcctcacaaacaacaaacactgcctttgccaggagaattgggaatgggaccattcttgaccttcctggaagaactcagaaggacgtttcactccaggaggcatcaggagggaagtctttcattgttttcaaggaatctgttgtccctgggagtgggtcacaagtgctgcacacacacttggtgtctctgaaggagcctcaccacatattagagatgaggttcytccttgcctcaggaccccatgcctcattggcattgctgcagggagaccccaggggcttgtggcagtcagaggtcagcagaagacacgcagggttgatctgtgctcatggactctgatctcacatcaagagccaggttccttttgaccgggatgatttgagaaatggtgggagcagggcagttatcaattcagatgagtagatgctgacttagctctgtacagctccctggcaccacccatggtacagggaggcagggattaggagaatgctggcctccctgtaggtcagtgatgttgcatcagtactgggattaggctggggtgtccaatcttttggcttcatgttggaagtattgtcttgggccacacaataaataaatacactaatactacaatagctggtaaactaataaaaagatctgtgcataaatctcatgttttaagagtttacgaatttgtgttgggctgcattcaaagccatcctgggccacatgtgacctgtgggttgcgggttggacaagcttggattagaggacagaagaacttgcagctttcagcttggttggttgcttgggtaagggtrcactcttgtgttctctctctctctttctctctctctctctctgtctgtctcttttctctctctctctctctctgtctctcatctctcactctgaaagaagtcctgttgggggagtcccaaaagctaaaccattggcctgggggagaaacgtgtgctggatggaaaagaggacaaaggcatagacttgttgacttgcatctccgaggtcctgtgatgtggccaggtggcctgcagctcacctgagagacacaggcaggatttcctctcgctttagaaattgagcagcctgcttggagcaggcttgttctcagattcattgacacttctgcccatcagggtgatctgcaggaatgaaaagtggttagaattctgttgcaaaggttaattttaaaaggccagtgaacacccacaagggggtcaccagggcaaaaccacagcacacacccgcctctccgtttaactcacactagtccaggtgctctgcctgctcttacctgcttttcctcttggttgggtaacaagcattcagttgactgyatattctcctccctcagtttcttctgacatcttcgtgagacctgagagcaagctctgccttggcgacaaccagttgtcatttcttagtggcagcctttatttttcaaaaaatgaagaaggataggcagtctctgcagagtgatagtggggagctgccagaggggcagcagggtcctgcgtgtatcctaccaactgtgtttccattctcttttctcccaccacagaagaacaagtaagcgtagagctgacagggaaaggtctccccaccagggctgtctgtcctgagagtttagaatgtgctgggagagcagagcattctttggggcctgtttggcgccaacaaggagcgttacgtggtctgtgaccagctgctgcacctcctgctttgctctggaaggaggccttgaaggccagttggaagttctgctcggctgccttgaataatgaaccatcaattctgtttcccagctgtgcttccacaccctcactcttggatgggactgctgggttccttgtctgccacaagcagcaattgctggaagtagcaggtcagaaatgggaaaggaggcctggactgcatagccaggcaagccagtgaggttggagcaaacccttgaacaggggctgggcccacctttgtagtcttgtcaccaaggaggttactgaagcctccagaaggcacactgtctgatccaactcacatgccagaggaacactgaatagtttccttccgatgcattacrttcattagttatagaaggaataaagccatcctatatcttctctgaaaaatgaaggagtgaaaagagcacaatgtaatcctattatggttgcaactcttcccagtttggttttctgcagatctatttacatgcatactttattctttcataatcatggtgtaatatcatctgtgtactgcattattttacttaccattctatcacaagcatttttccatgttactccagcattttcattgccaactttcttattggctgcatgagagtctatccagtgggtataccataacttgtcagyacattgtatcattttcataaatttaggttgctctcaagttgtatctgttgcagataacattgtagtgagtgtcttcatgcatatggtttctatattttgcattatttcctaggacacattcccagaagtcggattactggggctcgatacacattgtcaaattgctttccaaaaggattttactgattttattgcactctcgccagaattcaatattgtcttttaaaaaaattgttaatgtaatggcaaaatgttgttttatttttactgaattttcatgtcttcagtgatttgcaagataaaacagttcccagccattttctttccaaatgtagtttctgtttttgtaaactatttacatcctttgctcattaatctattggttttagtgttttttcttgagaactgtcttaacattgttatactatgctcatagtaacctatttcatatttccagttattttttctgtggtggtgtttgcccatctcattcggttaggtttttaaaaatttgtttttattattttacatacaaatatttaatttatatctttccatcttttttaatgatttctctgtaatagcaccctccctctataaatttgatagaccattttaggttttattattttatattaaactttttgtttgtctagaatttaatgctttgtattaaatgcatgtaagttgattttttaaattgcaactagttattacagcaccatttattaaataattcttcatagtttaaaagtggttcttccagttaaggttttaacataatgttagggataatttctgggcaatttgttgcttcaataataacatgtttggccaagcacagtggctcatgcctgtaatcccaacactttggaaagccagagtgggaagatcacttgagggcaggatttcgaagttatggtgaggtattwtcatgtcactgcactccagccagggtgaaaaagtsagaccctgtctctaaataacagtaatcatcatcatcaccttttattcttgggttagtaccacattgttttaattaccatttctttatggtgtgttttagatatttggcatcggccaggtgcggtggctcacgcttgtaatcccagcactttaggaagctgagacaggtggattgcttgagcccaaaagttcaaaactagactgggcaatatagtcagaccttgtctctacaaaaaaaaaatttaaaaattagctgggtgaggtggtgtgccccctgtaatcccagctactctggagggtgaggcaggaggattgcttgagcccaggaggtcgaggctgcagtgagtcgtgatcgtgccactgcactccagcctgggcgacagagtgagaacctgtcaacataaataataaatcaatatctggcagcccttctctgttttactattcattttctgatttttcttctgtagtttaacctattgttctaccaaatgtaatttaaaatcattctgtgaaatccagcaaaaatagctttttattttaattttgattagatttgcattagagctcagtattaaaacatgcacaccttttggtgccagatttcatactcaacatactttgttccttttgtgcgaaggaaattatgtttattatggaaaacagtgaaagatgagaagtaaatggctcatcctccataaatggccatcgctgactgtttcatgtagaactttctggcctgtgcccatatcttctctcttcaggctttggcagtggggctgatacttcacaggctgttccagtaccactgcaccttcactctggaggtgggagtgggactccgtgctgaggaccctagatgcacatctgttcccttagcagggagccatgtccagagagtgaggcatgcagggagtggtcatgtggaaggtgcggtcagaccgccaaggtcatgccatcttytgggcactggtagtccctatggagctgctgctggccagtgggaagatttggaggatttgaggatactcttcagagtgtgcttccacagtctaaccctcctgcttgacgacctgttatgtgtgagatggtggctttgtcacaggaatcacctgaaagacctctatctgggctccgtgaaactacctaagcaggtcagtctttcagtgaactgatctgatatcattgggctatcacgagcctgaggctggctccccactttcaaatcatcctcaaaaggcagggcaagtgttttcctctggttggtgatggtgtcctagcatgccctttttccagctggcttcccactgggctcagcccgatgsgtctactgcaatccccctttcctgtgttgccctcggataactccatgtgtaggcctgaatcgtgttcatttccaggaaaagtaaatgatgcatatcttactttccatctgtggtcattttttttctgcttgagaaacacctgggtctgcttgtttttgaattctctttttgtttgtctgaaaaagaaatctattttatttcaaaaattcaatattgaaggataattcagatttagaatttgaggctagcagttgatttctttcagcacttcaaagataattattgcaccatcttttagctttcattgtttctgttgaaggtaacatatctttttctccagtggagatataatctcagtgctttttcgtctttgtttttaaactttttattatcaaaactttcatacatgtacagaagtagaatagtagttatactattactattatattatgtagtatatactacagctctgttttaaccatcgttcacctttaccactgtcaaccatagctaagtttcttagatttatcatcccagctttgtctttctcaccattatgttgaagcaaatcttaggcattatatcatgtcgttcataaatatttcagttgtcattcaaaaatatctcttaaaaataagaattttttaacacctctatattattactccttagaaaatgttgttttatacatagttcctatagtttgcccaacttagtawctaaacaaggtaaaaatattgcctttggttgttatatctagtaagtttccgataatctttaggttgacacccctactttttttctttttttttttctttttgtttttttttgagagagagtcttgctctgtcgcccaggctggagtgcagtggcacaatctcggctcactgcaagttccacctcctgggttcatgccgttctcctgcctcagcctcctgggttcatgccgttctcctgcctcagcctcctgagtggctgggactacaagcacctgccaccaagcccagctaattttttgtatttttagtagaggctggttttcactgtgttagccaggatggtcttgatctcctgacctcgtgatctgcctgccttagcctcccaaagtgctgggattacaggcatgagccactgcgcctggccttttttttttttgaagtacatgatctcactctgttgtccaagctggagtgcagtgatgtgatcatagctcactgcagcctcgaactcttgggctcaagcaatcctcctgaatagctaggactataggtgtgcaccaccatgcccagctaatttttagtttttttgtatagctgcaatctcaccatgttggccaggctgctcttgaactcctggcttcaagcgatcctcccacctcagcctcccaaaatgctaggattacaggaatgagccactgcaccaggctccccattttttttccttataatttatattgcaatgtttgttcaagttctgtaggaaattccacattctggattttgcagattgaatccacatggtgttatttaacgtgttcctctgtctgctatacttttgtaaactgatagatctacagactcagtgagattcaggttttgtttgtttgtatgtttgttgttgttttttagcaagaatacctgataagtggtgtggtgttcttcccattgcatcacaccagcaagcacatcatgtttttctgtctcytataacgtgaagattgattagtggcatcaggtgctgccagcatttatccagattccttcaatatacagtagtttttcacctaattgttatggcagccaatgatgatcattgactagacccattattcctttggagttaaaaaaatccttactctaattatgttattctgtctgctttcattagccagaattctttcataagatggaaacttttttcataaaatagatggtaccctgagagtgtttattaaaggaaaggaaggataaatgcttgtctctttcattttaattatctatttgctaaatagtgaattkgttccctggcatcctccaaggatgaccagtaaatttttttctttaataccttcatgaattttcatgtgtctaagtccgttgtagttatgattctttttgctgaacaaattcttccatcttgttccactaggagtcttttcaggtggattcctgggtccttaccaccctgcttaagtagtctttgataatggctttctttttgatgtgacaaaatatctcaggttgatcttttacattttccatcccaaacctggaataagccaagaatatatagttgcttttagtgggaagtggtatttagaaatcataatctggacaacgagggtgctcactgcaactgagttactcattctttccaagccttttagtgggcagagctaggaaatacattttcttttttttaattctcttttccctgcaccaggatgtaaagtaaggaaatacattttccataggaaaaaaaatcaacatgaattcatactatatttgcatttccaatttaggattatggagattttagttaccttctttgattttatatgtgtaatttgtctcttacactgaaaatttgggtccctaatgacacaaacatgatgtcttgttgctttgtatgtatatataaaatatataataatttgtaatatacagcataatatagaatacatagtatatactatactatgtatatatttcacacacacacacacacacacacacacacacacayaaaatagtttcagaataacaataccaattgttactttaaaagtttgttttctccttaggatatatcctgcagacatacacaatcaagtcatgtttctcaggcacttgagatgaatccttgcatgtagctaaactcatcaatttgatatttaggataattttattttgtttttgatttttagtgattgcacttttttatttagaataatgtgtctcagatatactaagcaagtgttttcatagtattttcacttctgcccctacctttccctacaggaaaccacttttattcatttgttgtttatatattgtaacttaacttttaatatcagtaaatacacaccacacaaacacgcacacacagatgcgtgcaaacacatacttgtattcccatccctttcttattaaatgggaacatcaatactgctttttaaatctaactttgtattctggagactggcgtgttgtagtatatagagatatttctcatcactttttaccactgtgcagattccattgcatgcatattcatattttcttgcacctgtcctctaataatgggcgtgtgatggtttttcatcttttactgttatagatggtgcttcatctatagcctcatgcacacaactttacatggttttgccagtgtgtcttcatgatagattctttgcagtgggttgatgtaattggaaggcaaatgcatatgacaattttggtaaataatactcaattgaatgccataaggttattgaattgtaacatctcaccagaaataaacgagcctgcttatttctccacaacctttccaacctattatgttgccagacttttgtacctttgaaaatttatcacatgagaaatggcatctgagtgcagttttatagatctcaatgtatgttttttggtttgtttctatactgcttagagtttataatattttggaaaattctcagacagtatctccgttatcattacttctacctcattccctttctcttcttcttttggaactcaattacagatttgttagaccttaggcccacatcacatacatgtcttatgctttttttttttttactttatttttcattcattttctctctgtattttattctagctatatatttctgatatattttttacttttgtatttctttcttctgtcctataatctgctggtaaattcatgcatttttgttctctgtttctgttatggagttttcatttggttatttttgctaattggaaactaaaatttcctattcagtcttttggtcccttaaagactcttggtggttctgtttcygtggatgtgtttctgttgagttttttgggaagaagtcagtcttgttttatgatcacgtcctggtttctggtatgcctggattttcctgaaatgaatgctgtagatcatatgtaaaagatatacagacttaattgaaggtacgatgatgttatcttactccagatagtgtttatttttttccataatttcctgtgtttttatgttgtgtatatttgtttaataccatgaaactccttttctgtgatattcaaaatgaaggtcgtggtagttttgagtggaaggcagttttgtattgtgtttttaaaactttattttccagcaattaaagatgtccacagttatgagaaataatacaaagagatcctgtagcgccttctctcagtttcctctagtggtaatatctggcataactgtaatatatcacaaccaagaacttgtgtcactcttttataggtcaagcctcttttctcctcctcgccctacccmgtttctgacaaccactaatgccttctttatctgcgtaactttttcaccgtatgaatgttacataaatgggctcatacagtaggtaaccttttgagactggcttcttttccactcagcataattcccttgaggtccatccaggttgttgtatatagcaatagtttgttccttttattactgagtagtatcccataatatggatatagcataattattttcaaccatacaaggscatttgggttgtttctagttttgggttattttgmataaagctgctttgaacatttgtgtgcagttttttgtgtgtgcacaaaagtttttatttctctgagttaaatgcccaggagtgcagttgctagatcccatggtaattgcatgtttagttttgtaaacgtctgggaggcaggactttaaggttgctggggcctcagggatgcataggacagctggggcyttgcatcctcgactgcttcagctgaagacacagtctagagtctgtgtactctggcttaggttgagattgggaagacatcccttgttctcacttccagccctctcacttcagtcaagacttttgcttacaaagggcagcacagaggctcaccgtgcttaagtgtcacgtggatttactggacagaccatttgcacacatgtgaggcaagtggtatcgaattttacctggtagcaggtgccagcttccttcctgcatgccctgtcccctttatcctcaaagcaggcagagaatatggccacttggcattctcagtctcagcccccacaaccccacccccagacagagatgtacactagccccttcatttgagttccagatgtcctaaggcagaactctgaatgtccctttgggtcctatgtctagttctgtccctggtggccagtgccagagtcttacagcacagccccatgtgttgggagcgccagctttggggtaattgtcatagacagtagcgccctgtcgggtcagttccgtgtgagaacctgagagggaaggagagttgctcacggtcagacaggagctctcatcagcagctgagcctgcatccccaggcgtttgcctccttcctttggttttgctgatttcgcttccttgtggggagacagagctcggcctttctgctctcctgttgcgctggctgtgtactgtttattatagcctacgtagagagaatagagggacagacagcatttctggtgacagggcatatccagtgaaatgcagacataaatcatcttttaaacaagggtgggtttgcggtaggaaggcctgtgtgaggaaataggccctctctgggctccctccgtccttcacagagtgcctcctgacccagggtcgcaagccaggttctgtgccaggcaccactccagagcaggtatctgtggcttgacaaggatgcacagggcagccgatccttggaaagtctgtgtgtccaaagtgcctctggwtatatttcaaggacctgcctgagctgagtcacagttagcctctgacaatatttctaatagaccactctgttgttggacagtttttaccatttgcacttccagtatgaccactccaggtctctgcattaatttttctttttaaatcctctgttttaatgttttcggggkrgggggggcccacttctatctgaaaatgcccatccagacactgtgggttctgtgccaatgccagggaaggaagctcagggttctgccctgggccctargacyttagtgactcaggcagccctgctactggttgggagcgctctccactggccacctctgctgcaaagctcttttctcttgcttcatgagaagtggaagagtgtgaaacagtacacggaggcctttctggctgtttacaagggagatgggccaccagtgtttgtcaccggagcttcagggtagcatgcctaggagaggagcaaacaggggccttggggctgtggagtcatgctgggaagatgaagaaaagacagttggtaactgacaaattgcaggtgtgatcattactctctgtgactccctgtttctcagatgcactgttgcttacatctttgtatgcttttgcattcctgctgattgattcaaggtgcaacgtgcctgcttgtcaggtatgctgttgatcacattatttragaagaaataaagtcgttccygcagctccacstgcagtgatgggctttaatgttttgtgcttcccgaggaaaacctgccgatgatgtgaagtgacattcaacccgccgagagctgatactggcagacaaatttcatgtcctgtctcctgatcaccagtttgctgcctccaagttgttagggatattaaaaacaggggtgggaagtccccacttgacaggttcaatttgtaatgtgaaaggtgctgagaaacaaagcaaggacccaggcagctttctgccaaggctgctggccccacactcagcaaggcaaagagaaaggggatctatctgctagtagcatgagtgtgggagaggagggggctgttgtagggtgccgtggaggactcatacatgatcctgggaagagcgctgctgctagcccagggccacaaagcgtcaaggacgttgagctcctgtgcatgctcctgtagccttgtgtcatctgaagaagcacagaagtggcaggaatggccttttcatagggcatgggatgctgtmactgatgtgcaatctgttatctcaaaggagaccttagcacaagtgggaaaggaaaaactgcccgaccatggagagaacacaagtgggctgagtgtagctgcctctccttacctgtggctggtgccatgaaggagtgctgctgtcattggacactgtggggccagcacyrggttttgtgtgtcacttgcattctcccttggtacacagagcccagactggtttcctggtcccttcccagcgagcactgtgatggctttgccattgaggtggatggaggtccttgaccaaagcatgcttccccctgaccccatcccacccgcaggttggcagctcatcctcttccacctgctgtgaaagggctgggtctggggacatgggatgagggcgacttgcctgccctatgaaccagaagatcaacccctctgaagccaggcagcagattctgcggctagatcacccttagatacagcacagggcctaacgtgttggtggcacccactgtgtatttgtgggatgcttgaggaaatcaaaaagaaaccaacacaaaagaaaagactcttcattgtaaaaagcctgatgagaacagacaggatgtggcctctgccaaaaccaccatccacttccccacccaactctctgcctccagtatgccctgagracccgcctagtcatctgatctgcctccatcatgcaggcgtactgagctccttcactcctcaggtgaagccacccggagcacaccgcggatatgcagcttgagaaagccagtgtgtgctcgcccacgttaccctccagggcaggtgcaggtgaccacttgtctcagcccacctggcccctcaactcattttgtgttactgaccctctctcttccatcctcatggtacttggggtgtccagtttaaggcctgtctcagatatacttataatgcaatagaacagattttatttaccagttgaacttccttttctcccagagaccattatttgcactaaatgtggttttgttttgctttttgttgtcgttttttgttttgttttgttttgttttttgttttttgttttagatgaattctcactcttgttgcccagcctggagtgcaatggtaccatcttggctcactgcaacctccgcctcccaggttcaagcaattcttctgcctcagcctccccactagctgggattacaggcactcgtcaccacgccaggctgatttttgtacttttagtagagatggggtttcaccatgatgaccaggctggtcttgaactcctgacctcaggtgatccacccaccctggcctcccaaagtgctgagactacaggcgtgagccaccacacccagtcaaatgtagtgtttcatgtgagttgtcctattttttttttttttttaagatggagtctggctctatcacccaggctggagtgcaacggcgtgatctcggatcactgcaacctccgcctccctggttcaagtgattgtcctgcctcagcctcccaagtagctgggactaaagatgcatgcccagctaatttttgtattttttagtagagacgagttttygccacattggccaggctgstttcgaactcctgacctcagttgatccgcccgcctcagtctcccaaagtgtcaggattacaggcgtgagccaccacacctggccaagttgtcctattcttaaataaggatagcacatatagaattattatggggattcaggtgtaaccccagggctttgggaggcctaggtgggaggatcacttgatgccaggaatttaagttttcagcctgggcaacaaagtgaaaccccttctgtgagtccattttgtgttgctctagaggaatacctgaggctgggtaacttgataaacaagaggtttatttggcccatagttctgcaggctgtacaagcgtggtaccagcatctgctcagctctcagaggccttaggaaacttttactcctggcagaaggcagaaggagagcaggtatgacacatggcacgagcaggagcaagagagggagaggaggaggtgccagcttcctttgaacaaccagctttcgtgtgaactatcaaaccagacctcactcattgccacagggaaggcaccaagttattcataaggtatccactcccrtgacccaaacacctcccactatgccccatctccagcattgggggtcacatttcaacatgagatttggaggggacaaaacgtccaaaccatatcgccccctccctacaaaaaaaatttagaaatacctaggtgtggttgtgtgcacctgtactcttagctacttgaggggctgaggcgagaagattgtttgagcccaggaatttgaggttacagtgagctgtgattataccactgcagtccagtgagacactgcccaccccaccccrataaaaaaaaaaaaagaactgtgattgggagggtttggggccaaggttgcttaaacaaacacagcccacagctctgtgccaattgaggtttgggattcctgcctcacccctagataaccaataaagtagctatgatacattaagttccttttgttcttaagagaaggtgatgggtgtaactagagtgttgacaacatgaaaaacctaaaatcagkttggagataaatatttaaatctcctctattggatactgataatgatgctcttaagtaaaaataaatatagcaggggcctattaggggagacaggctctggctttcttacagcatgctgttgctgtgtggtttgggtcacgtttcttaacctctctgggatttcctttcctctggtctgaaatgagcagttgttgtacttgccgtataatttctgaggcctcttcttactcagaacttctgactgtttttaaaagatggagcattacctctctatacctgactgtgccgcatgccattcgattttgttatcgaagcaggtcagcccgttgtttttcacatagattcttacaatgcaacaaagcatcacagttactcacaagggaaggcaggggaggagggggaatgtggtgtcagaagccagacccatcctcacgtagtggagctgcacctgcccatctcccagaaagtccttcaagcccctttcagcgcctccacctgcaggcctgttctttgcaagcctggctgtggtctgttttgcataaaagaagattatccagcagtggggtttgctcttctctttttacatggctgccatagcaagccaacaagaaacctgccgtgtggagtgayggtcaggaaccttgcaagatgccgtcgaggctctgtctacaccaggcaaagaatcttccagattcctgctctctaactcagatgaaagtagttgctgcagagtgtgtttgcttctctgtctgcctcagggctgagcttctaaacatacctggtctagtgggttgcacagctgattccaggacaatgggatgagggaaggggaagatagaggctggcagaggtggctttttgtggcatgcatgggaaagcggtagggggtgctcttcacagttgtgggggaggcttagcctgaatctcagggcacagctgaagaaggagagcagcctggaaatgcgtcytaaagagccgctcagccacggcagctgtgagctgtggcccatcagtggctggaggtgggaccatttgagcttttcactgagatagagcctgtgtcaagtgttctgaacaacttgctgtggcctcatgtgagcttggctgtggaatcagggaggccagcacagagcgtggggcagctattcccagttcatcagcatcagccacggtgtgcagaggaggggtgggagtgagggatggtcgagagggagaacctgttgatttgcccgcaagctagttgtggaagacaagcacaggccaagaaatgtgggtggacaccattaatggagatggaaggaggtgttggaatggaggaacacggtcattgactttttgcacatgcttagtctgagatgcctccagggcagtaggataagctaacctgtgggaatgtggagggacgaatccatagctcagaagcaagcggtatctgcaggaatggattatactggctggatcatagggggtcagtgagtcatgagaatgagccctaattgtagagagtaggatgtgtgatgagagaagtggggacgcatcgtcatggggaccatcttgatggagggagggagaaaagagaggagagataggcagtgagcacagaaggaggagaggagaaccaggcaggagctatgccagtgacaccaaggaagggtgcgtttgctgtgatgtgttttcatcacgttttcataattaaccaacagattaatattcctcagaaatacaaagcacctctcaatcatgctataccttcttcccaactttacagtaatacatttcttaactttctagttatgttttagcaccttagaatattgaaaacataaaccaaaccctcatggcacgagcatgggaagcccttgtgatgaaaatcagctcaatgagaggggaaatgmgggaagcatttttagcagaaagtgatgacagcttggagcatcccaaagctatgcattattcagacgtgtcggagcgagagtgcccgatttcaccacccattacctattgggatgccttcttctctgcttgctaatctgaatattactcatttcaaggttttgtttatattatcttgaggggaaacaaacagtacctaattaatcccaccaaacataatattggaaaagcaattattcccaccacgtgtaataaaccatctgtagggaaaataatccattaagtgtgaatcagtgtgaattttaaaactattattaagatcagattggttcctcgttatgagcaccataattttagtatttgttcrtgcatactgtgttatgccatgttctgtaaccttaaatccttaatgtccaaacaaataatatctatatgctaattagtgtcaaaaatcacaggtcagccaatcaggtgtttcacagatgagccccttttttgggggttagctcgaatctgtgattaattagaaagtgagtcccctattttgaaattctagtgataattgtagcagagggctgaatttatttgcattttcagtaaatcatccattaactgaaatgaaatctttttgttaaattactgctcctggttcagttaggagggagttttcccttcatttttaaatgtactggagtatccttcagttctccttgagtgagaagcaatcgctttgaccattgtcaaccagaaagaatttccccacrgcatttctctctttcccagctgggccataaattgtctcrtgactgaggttgctgtctgctcctgagcaagctggaagcaatgatgagctcagagctgggctttattaaatcctaggaagacacataaaaattgttagcrgttgatttcgcaggaaacacctagcaaacttgtcggggtttatattacraagcccagggcctgcagttagcagatcatcttttttgaaaagcatttgggtacctttgtcagagcttttctgcattttgacgtaggaggatacytgagggccatggttgtgagaaaggagagaacccacccaggtgtcctggggattgttttattcataaagtaattcggatgatctcgaggtggtccagggagatgggatagagtcagccaaggtgtctattgtaagatagattgtgaacccctcaaagataggctgaagtccttattcctgtcacctgtgattgtaaccttatttggaaatagggtctttgcagatataatcaggttgaggtgggtgcatgttggagaaggatgggctctttattttttgtttgagaccatgtcttgctctgtcactcaggctggagtacaatagcatgatctcagctcgctgcaacctccacctcccaggttcaagtgattctcgtgcctcagcctcccgagtagctgggattacaggcatgcgccaccacacctggctaatttttttgcatgtattttggtagatacagggtttcaccwtgttggccaggctggtattgaactcctgacctcagatgatccacctgcctcggccctccaaagtgctgggattacaggcgtgagccgccgcgcccggccaagaagggtgggctcttaatccaatggctggtctcttataaagaagagaagacacagacacacaggaaaaatgctgtgtgaccgtggaggtggatcagagtgaaacatctgcaagtcaaggagattgccagcaacaccagaaactaagaggaaggcatgggacagagtcttccagacgggcttcagagggagcatcgccttgccagcacctggatttgggacttctggcctcttgaactgcaagaataactttatattgctttaagccccccagcttgtggtcacttgtcatgccagccccaggaaactgacatgtcatctctccgtgtgactggttaagtcttgatgtgatctcctagacctacgtactttggagctagccagggtatgatcagcgagaggcttaggacttggttagttcaaccaagctgttggagcccattcttgcctcaacctagtgaaatcaaaccttgcatccttttctcttgcctttctgaagatgtggatttgaaaaaaagaaaagtattcctgcaaagttccttatctcaggctccatggcatttctcagagcatccggccattgagaactgactccgtttctccaaattcagccttcccatgtgagttctgtcctgagatgtgattggggattggaagccaagcagacccagcaaagggaaggtgaccagtggactccacctgctcagcaaacactgacctggcttttcctttctgggaagttcygcaggccagctggcatcctccccgatggcatttcctggagtcctcacctgaactcttgggaattgccgcctagagaccaccatgcaaagcaggatgttgaagacagattagaaggcttctttcgcgctgcctctcctgtgcggcttctctccgttgtctgtctcctctcttgtgctttctggatctcttctaaagcttcttgggaaaagccaaacaggaaatgagccaccaagagactgggcttagacaatgatggccaagtagaaaagattctatgttctagcattggggactgcagaggagacagctgcccctttccaggacctgtcgaaggacaaagtctaaggtccgtggggatcacccttcaggaagatggcatcaggccacaaaaatagaaaagagatatcgccctcccttttatagcacaaatgttaccagtcatgctagtatcaaaaattatattccagtttactttctgcttccctttcaggcctgagatgcctggttgatccatcttcgaatactttcagggagctagtttttcttgggcctttttccctcttaggggccaccacagaatggcctccccagccgttttctctccctaattctggagcctggcctgcctgtcctcccgagagccccacctgactttctttgctttgctttgcctctgtggctsagcttgtttcatccgttcctccttgccattttgaaggcagtgccagcactggagaaccctatcagtgcttgcaaccccaccacgaggccggcagccgggagggctgggcgcatccgctcactgtaatctccagaacagataccagcttttcctaaccccctagcctgttctaacccttgaactgcttgagagatgtcaaaatcataactctctggggaagaggagtcagtgtttctgtcctagcagcacgcatcagtgcaatcagagctctgtaaaagccaggatccaccaaggggaggatttgtgaagctttttccagttacagtgagaactgggcaggcatcgagtctcagtttcagtgccgcttgaatacagggtgtcagtgtcacttgagtgctaggcggaagtgcaggttaggcctggatcggagggttaatgattaggtttctcccgggctgcttttcacatcagtgctgtgcaataagcacttttacaagtcaggctgcttcctttgtttgagctgctaaccctgtgtattgagcctagctaaataactccgatattaggataatatacaaatgaatgtgtaaaacacacttcagtgagtactgtgctaaccgcttcttttggtggagggaggaaagaagggtgtttacaaaacggcttcgctttgctattgtcatgaggagaacaggaatttctccaggctgtgtggtcaccggtgaatatatgcatctaggttttagtatttatttggaaatcaaatgtattatgggcaagggtatgtaatgaaccagccatttaaagatccctggacataaaatgcaagcttttggctgcgcgctgtggctcatgcctgtaatcccagcactttgagaggccgaggagggcagatcacttgaggtcaggagttcgagaccagcctagccaatatggcaaaaccccacctctactaaaagtagaaaaattagctgggcatggtggcgggtgcctgtagtcccagctactcgggaggctgaggcaggagaatcacttgaacccaggaggtggaggttgcagtgagctgagatcgcaccactgcactccagcctgggtgagagaacgagactccatctcaaaaaaaaaaaaaaagaaaaaaaaatgcaagctttcgacaaagcctgcctgcctgctttgtgtgtgccttccctttttcttgcagtggccctgtgggtttgcatggccctctgtggccagcctcaggatctagggtcctctctgcttgtagtataagctttgaatgctgtggcccggagcttttccacagcctgtgtttcctgcttctggtctgctctagagaaattcaagtcaggtttggcctggcttggccaacccgagcttgccatgtacctgagtcccaagggtgtctgtcccctaactctagccacctgttggggaggtaggaaggtctgggagggagatgctgaggagagcagagtcgtgtgcagaccaggtgggactggactacaggagagaccaggtgggactagactacaggagagccctggggggccactcctggggccaggagctgctccctgagggaattctgaagctggtttgtgattctgtgtcacagccacctgcatcccagtgaaagctatggttgctttccataggtaaaggcaatttgaggacagcaaacatattttcccccacacaatccgtcattgtctggtgatgggctgtcagtccaaaccgtagcctagaaatcgtagctcaggaagtagagtgctgagaggaacaattcaaacaattttgtttcctaaatgtattcttcagttgaagtctttgtggttaatgttgatagtttgtaggcacaatcactattctatgcatagggacagcttttcctaactctggaaaagagggkgtgtgtgtgtgtgtgtgtgtgtgtgtgtgtgtgtgtgtgtgtgtgtattgtcaaaaaccaatggaagagaaacacttcaaaatgggtgagaacagagaacagcatgaaatatggacagcagacagccctgtatgcaatgaaaatgcaggtgcatggtcactagaaaagatgcctcattctttgaatttttggctctttgaaacacctgtgtgacattaaattttttactgaaatgtggtattattaagtcttgcgtttaagtttataatcagaaacaaaaacaccatgtcctgttaaggaaagagttattctgacaacggttagcaggataaagaagattttactcaggagtattgcaataggtgtcaagattccacagaagaggagagagatcagtctcaactcgaaatacagtacaaaacttgggatttatagccaacaacctgggtggggcaggtgacagtcagtggatggaaaattactaagaggacacctcaaggataggaggtgtcttgctaaatgaacctaataggattcttcctgaaaacaggccaatgacttagacagcaaaggtggaggatgagtaatttgatctcatgtcaagggtgtggattcactccaaactctcttagcaggatagagccaaagtcaatgcctagttgagaagagagctcagaggagcctggctaacatttagtcaaaaagagtctctgtcagtgctcgatttagttttattartcaacactgatactttctgagctaggcactgggttaaacacttaaaaaaaagaaaaaaaaaggttggccaggcatgggtggctcacacctgtaatcccaacactttgggaggcccacacctgtaatcccaacactttgggaggccacagtaagagcatcatttgagctctggagtgcaaggccagcttgggcagcatagtgagaccctatctctacaaaaaatttttaaaaattagccggatcatggtgtgtgcccgtagtcccagctacttggaaggctgaggtgggaggatagcttgagcttgagaggttgaggctgcagtgagctgtgatcccaccactgtactccagcctgggcaacagagtgagatcctgtctcagaaagaaatagtttagtggcaggtgagagagcatcatgtaatcgcgatgtgtaaaaacgtgcaagaatggaattgtgcagaaaacccagtgcgggcttatcaacccgaagaattccctctgggccccagggaacattcagcaaagaagctaccttggggattgttcttagattttaacaatttgctgggatgagagtatttgagagtggaaagagcactgggctgagggaacagcacgtgccaagcgatggggaacacaagagccgggttctgtggctgctcagggggcagagctccagccaggcctacaaggcacacaggatgggggtgggggccggagctgaggctgcggagcagtcggggaacctcttccatcattgacaagtgagcccaaaccatgccattccaggagtgttacccyagccgcttgttatgaagccctctgttacttgggatgatctgagtggccttccacgcacttcagaaaataaattccttttttatggtgagcgaaattctaatatatatttgtattttcactaaccttaccaaagagaaaaatgtcagcccttttcctgaagtttcttttgtccacttgtgactttcaattaaattttaaaacctccagagtaggaggaatcccccacagagacmataagttagctgattaattgaaaacgtggaagctatttttatgattaccacataccttgtattttatttttactgaaaacacataagtgaggtcaggtgtgttggctcatgcctgtaatcttagcattttgggaggtgaggtgagaggcttgcttgagcccaggtgtttgagaccagcctgggcaacatagggagacctcatctctacaaaaaataaaattagcttggtgtggtggtgcatgcctgtggtcccagctactcaggaggctgaagtgggagagtcacttgagcccaagagttcaagattgcagagagccatgatcataccactgcactccaacctgggtgacagagtgagactttgtctgaaaaaaaacaaaacaacaacaacaaaaaaactcacataagtgtaccttaggctttttttgttttttgtttgtttgttttgcttaccttttatgtaagtccaatgcttctttttgaacgtggttccactgatgagcttctataatgcctcatcaacagttctgcctacaattttttaaagtggagttagtcacatttttcaggttttccagttgtctcaccccagtctaattttgcatattttttttagctctttacctttattatagcctttgtaaagcattccatttagttttccaaaactggttctttttcrtggcactaataattcattttctcatgtcacatttatttgaattacgtaattatagtagcaaggagaattggtattaagtaagttttaggtgaaacccatcgactttgggattgtgcactctgatgagtcgggcagaagagtccaggtgttctaggggagcctgtcactggtcagtggtcagtgtatcccgaggcattgcaaatcctcgcttatctgaaggacttgcttccctggaaatcttgtctgaggatttttgtgttcctcgagtgcccaacacacattgctggaccttaaggggacacttggatatacatgatctggtccagccataagggcacacagtgtgggagacaaggggccattctgggaacagtaaagaaatgagatgtgccctcagggagctcagacaaggagctgctggagaccagcagggaggaacagtgactgtactcaagcctcaacacagatcctcaggaacatcgtgttgggttcattggactctgtatacagtcagaaaagaatccagaggaagcacagctaagagaattgagacagcaatttgctgtggcatctccgcacagaggtagaagtttattgatttgtttcctctgatttcagaagtagtttttcgttttgttttttcagtttctgttcatgtcatagaccagcgacccctgctcctccatgccccttagtctgctgggttgaccagatggctggcacccagcactgtggcatctatgcatttaaatattattattagaggctgagggttttatatggttagctcaagtacgttttatgcattttttttcctggttttttttttttttttttgagacggagtctcgctctgtcacccaagctgcagtgcagtggtgcgatctcagcttactgcaacctccgcctcccaggttcaagcaattcttttgcctcagcctctcaagtagctgggattacgggtgcccaacaccatgcccagctattttttgtatttttagtagagatggggtttcaccatgtttgtcaggctggtctcaaactcctgacttcaggtgatccgcctgccttggccttccagagtgctgggattacaggtgtgagccaccgtgaccggcccattttatgcatatttgatttggagttggtgaatcaactcgaaaacctcaaaagggggctgtgagaacactgggctttttagggataggtttccacgttcaccratttcatctgaatggactgttgatgcttggtgctgtggccatgcccttggctcctgcatttaggagcagtgaatgtggcgtccatctgcagacgtggctcagcatcatacgttacaagcacagcttttggtacaggagctctcgggtcgctgggagattgaggattatgagaacttccttctttcacacaggggtttatcccctattcagcattacatcagctttctctgactttggcatggtgttaggaatttatcagggaaatacgttctgtttatactgactacattacgggaagcttggataactgtatgggggactttaaaatttatctctctgtgatagtttttcagctattatgaaactaaaccaaacgaaggcagtgggggccattataaaggaagtttgagaatctgaaagtcttgatttcttaaaaggaattttaccataatctctctctcgataagaattaagaaaaatacttacatgtattatgtgcaaagtgtacccgttaaattcaccataattgaaagatgcaatactctgtcaatagtttgggaattgttttaggattaaaagtgagatccatttgtaagaaaatgttttcattttagtaatgttaatttgataacttcattatattacttctcaatatattactttgagagcaggtaaaaagagttttccagagcctactggaactatgctaatcagatttatggtacctcttattttcctggcctttcattttgtttttgtatttaagtcttctgtgttgacagctgtcatttgatgtgagacaggtgaagctccttcctgctttggcccacagttgggcagcattgtccccggcctgggctggcctcatcaagtgaaacatcatgctgccatgtttcgacattttaccttttcaggttctgcactttttctgtgggaccatcccctcttccccgcctgccctcttctctctggggtgttttagattttaacccagcctctaacactggacacacaagtcctcagtggagttctgtcgttcagtccgctgtcttggcaaacagtgcccaatcaagaaacaaacgtgctctgctggctgcaggctgcctcatttctccccgatccgaggaggtgtcacatagtcatgatccttcccgggcctggcctggggcagaacaggatggcaaacacctctgcaacctctgggtttccagtcctgccctgggtgggcctggcttcgcctcatgaaaccccgagtactgtttgactccctgccatagctgagtgcctgccccaaccccactctgagttcagcgcacatcctggtgtgaacgccaccatctcagggacatcctgctgcaaagctcctctctgtctccttggtctcttgccacctacagtctttctcatgggagccccacccctcagaaggctccccgtctctcctgtccgtgagttttcctggaattgtcacaatgcagagaatgagttctgtggggagggtggggaatgtagccctgtggctgtcccagcaagtggcccctgtgggctggtggctggctccatttgagactgccttgaaccatggggtctcctggggaggggctggagctgtcaggcttctttctgctggatgacgttgctgtttctggcagcaccattggctgcatctcagactgtgtcccttccttcaattctgttgatgtctcagtttgtggaaattcggaaaccacatgcctttctctctaggggtgacagcattgttggcctccatcctcctgtcagtccttacgagtgtcttcatgccaggtggtgccgtcatggcatgtgttgggcagctaaccagtcccttcagtgtggggcctggcctcctccttgccacctcgttggtggaggtgacctgggatgctggacccactcttgtttggactcagtgtaggattctctacctctttctcccagttacacagccttgaccaagcttctttattcctctgatcttttttgtttgtttgtttttactttaagttcctggatacaagttcagaaggtgcaggtttgttacataggtatacatttgccatggaggtttgctgtacctatcaacccatcatctaggttttaagccccacatgcattagctatttgtcctaatgctctccctcccctkgctgccaaccccctgacaggccctggtacgcgttgttctcctccctgtgcccatgtgttctcattgttcaactcccacttatgagtgagaacatggagtgtttggttttttgttcctgtatgagtttgctgaggatgatggcttccagcttcatccatgtccctgcaaaggacatgaactcattctttttttatggctacatagtattccgtggtgtatatgtgccacattttctttattcagtctatcattgatgggcttttgggttggttccatgtctttgctattgtaaatagtgtcgcaataaacatacgtgtgcatgtgtctttgcagtagaatcatttatattcctttaggtatatacccagtaatgggatggctgggtcaaatggtatttctggttctagatccttgaggaatcaccacagtgtcttccatgatggttgaacaaatttatattcccaccaacagtgtaaaagtcttcctatttctccacagcctcgccagtatctgttgtttcttgactttttaataatcgcccttctgactggcgtgagatgctgtctcgttgtggttttgatttgcatttctctaatgatcagtgatgttgagcttttttttttcacatttgttggcaccatgaatgccttcttttgagaaatgtctgttcatatcctttgcccactttttgatggggttgttcatttttttcttgtaaatttgcttaacttccttgcagattctggatatcagacctttgtcagatgggtagattgcaaaaattttctcccattctgtaggttgcctgttcactctgatgatagtttcttttgctgtgcagaagctctttagtttaattaaatcccggttgtcaattttttgcttttgttgcagttgcttttggcattttgatcatgaagtctttgcccatgcctgtgtcctgagtggtatagcctaggttttcttctagggtttttatcattttgggttttacatgtaagtctttaatccatcttgagttaatttttgtataaggtgtaaggaagggatccagtttccgttttctgcatatggctagccagttctctcagcaccatttattaaatagggaatgctttccccattgcttggcttgttgaagatccctctgatcatttttaaggctggttgagaccagccctgtggaggacttccttaattttcagtggcaatgtttttaatcagtgagatgactcacaacactaaacaattccccatatatcttgtgtgttaggttaagggaataccatgttctttttttttttttttgagacacagtctcactctactacccaggctggagtgcagtggcacgacctcagctcactgcagcctccacctcccaggttcaagcaattcttgtgcctcagcctcccaagtagctgggactacaagcacgtgccaccacacccagcaatttttgtacttttagtagagacagggtttcaccatgttagccaggctggtctcgaactcccaacctcaagtgatccgcctgccttagcctcccaaagtgttgggattataagcgtgagccactgcgcccggcctgctttacactttttacatagatcctggtgagaatcggacctgggatttttctatgaatgagagcctgttgtatgccatacccccaccccacccccttacccccacccctacagccttcctaatataaggaagaaatgaagcagccgagccatcattaagcagatcacctctgaaaatgaaggaaattggatgaaagctctgccccggcagctgagtgctaaattagggagaatcaygggaggccaagggcatggccgggctttgtcgctgccttattatggatttgataagaaacaacttttttgactgtttacattatggaaatgtgataacccrtttgtattacttaaactgtgcattttgtaagtgttgtcaaagggagggagtaatttgtaacagaagcagagtatgtagaaactgttctcgtaaaagcgttctctaaattgctttgcttgcagctgtggaggttgccrtaaagaatgatttctcatattggattttcaaagccgcaggagtggccacagagcaggcaacggacagcccaatgatttaagattatttaatgccccagttgtcgtgaaatagaaggaaataaactccagtgggctgctagaacacattactacaatctcttaatgccccaaactaggagactgatttatctcctgttatgtcttattaagtgacattcagaagaagaaaagaaaaaaaaggacagccaaagctgatggctgaaaattaccctgaaatgagtgtgatgcaggcaggcttgtatcgttcttaagttcaagaacccaaacttgaactcaacactttttcagtgtgttttatttgttagtacagagatatttgaagatgacagattgggcataagaataggccaaaaggctgtctgccccagtgcttcccagacttcattgagcacacgaatcgcctggggctcttttaaaatgtagattccaatccagaaggtctgggaaggagcctgcaactgcatttctaccaagctcctccatgcttccaaggcagctgttcctggggccatgctttgaaggagcaaagttctcattcatcctgcagaaggaacctgcagaaattctcattcatcctatagaaggaacctgcagaaattctcattcatcctgtagaagggacctgcagaaattcttactcatcctgcagaaggaacatcctccaggcagaaccaaaaacagctcattgtcttcctttatgcagtacacttagggcatccctattccaaacatccgaaatccaaactgttccagtgagcatttcctgtgaatgttatgtcagtgctcaaaaagtttcaggttttggagtattttggaattttggatgttcagattagggatgttcagcctataagcattccaaaatccccgcaaaagaatgaaatctgaaacacttctggttttaagcatttcagatcagggatactcagcctgttgttctttatttcacagtcgtcctttcgtcctttacataactgttgtccctgtctctgcacagctgattgtgagtgatcggatttgaactccctacaccctctatctaacccattcccctcttgcctcatcctcagtgaggacaaagaaggttgctctgggctgcttaaattgactcctacatgctcagtatatatcctgcatgtacctgttttttattttttttatttttattttttttgagatggagtctcactctgtcacccaggctggagtgcagtggggcgatctcatctcattgcaacctccgtctcctgagttcaagtgattctcctgcctcagcctcctgagtagctgggattacaggcccacgctaccacacctggccaatttttgtatttttagtggagacggggtttcaccatgttggccaggctgacaacatatattctcgtggttcaaatggtggcttttgttttcatggcattctgtcatgaacccagagctcttgatgcctaagagctgcctaaggcagacccattactgcctaagaagaagagaattggggctattaaacttgcaggtttgcaggtatcccagccagcactcttgagaggcagtgtccatagaaatagcrgtgatgatcaccaggctctccagtacggattcctaggasggggcagcagagccatgcactccccastgcactggctggtactggggccctcartgcccctctgggggctgcaaacacaagagatctgggctcccaggccctatgcacttctgcagggcacaggctgcttcttgcattcttaagtccccatggataggaaagcccaatgaattgggatggtctccagtgagggcttcacacttcctttataacatgcagcattttaggttggtgactggtgtgcactgggccaagggtccactctgtctctgtccttacmcccgggcttgaggactagcccctgccaaatgtcttacgggctcatcccagtgggcttgttgagtgggctgctgagtttgcaatgcctgtccctcctctatttaccaaaagcaatgttttctctcttcacttgctagggtttcccattctccctgtgcctccacccccatcctcctggcagccagatggtcttccccctcacagccatcactccctccctccttccctccttctctccctcccttccactgaacaactcacctgctggtctctggacctcctgccacataaaccattttccacactgagaccacttctctctcctgctggaaacctttcaaggattgccatttaggagagatgttaagtccactcccctagcctggccattgaggccttggctccctggcccctcccagtcctgggctgcaaacaaactgaagctctgggctcccttgaccctcagccattgcccgtgccatcctctctgctagacatcatgactcagccagacctcagctgtgtgacccactccaaacaccagctactctatgaagtcttcccacctggatgcaagcaccagaccctcgtcttcctctatttccatgaggcaccatgggcacccctcacctcccctcagagtgccacccatatgcgatgcaatcactctcaatagccctgacacacacaagcagggacaatgtcctaagcatctttacatcccaggacaagctcacgagtaggcmtgcaatgacggaatggaagagtgggtaaatggacaatagatatcactgcttggtaccttccactacaagcactggacttttagggaacagcatttaagccatagcgagaaaatagctaatgggatttctgaaatccacaatgaaatgtcaagtaaaatgtttcctccttgggtcaatcaatgagctgatttcttattctctgatattgttgtgggcttgctttagacctaaccgtacccttcagggggcttactgcaggtgcacattttcagaaggatggagtcctgagagaaggccctcgttcctggtcctcacccatcctccacccctctcgacccgcagcagacacccccaggtctcctcttttccccccgcctccctggtttccctttggaggtgctttcaggatatgctgcctaatgctggttcctgttagacaggttcgcctgagggctgagggatttcatctagaactacagcccctcgaggggactccargaactcttggctctttggctcccatctggctcccagcttgctcgtatttgtttgatccgggcctgtgtgtgttacatttttataggatctccctccgatgtgcacatcgatttgttctgttcagatgctttgtgtggaacgtattttatgtggtggtttttggagtgttgcaccctctagagaaaatgacctttcatgcccgtgaataatgaggctggaaatatttctcttaactcagaagcatctgcacgcacttgttttcacacttgagttgatgagcctgctcatggcatgactttcctccaaagacctggggatccgaataatgcctatttttagtgcctcctgaaaacaggaaagggcagaccatggaaatgtttcctttgtgggagtatttagcttcaagtttagcactgggcaggagtgtgtgtgtgtttataagtatgatttgatagatcatttttctcaactacacactgaagaaggggaaaatgaatcataaaggactacctggagaccagtagtggctccagcagtgggttctgggcaagctgtggctgcgcagtgcctgccggcctccagatgagcatcccattcatgctggggaraagccgggacagcttgagcaacttccagtgtaaatgggcttcattcactgtgagttattttgaatgccctcttggccctgtagggagttgcagayggtaatgtatgcatgtacatagaggcaaaacctcatagatcctgttttgtttttgttgaaacactaggtttttgttgaaaattagaggtcacaatgtgacaaaatccctctgttcttaaagtaagaagagccacccaatcccagaagcatattcatgggaagccagttttcatagtcttcccagacttcttcagaaagtagctgttggaaagaaccctgtctgtcagtgtctggaagctcattgccatgtgtgtgctgacctcgcaccctcctaggggaggcagggggctgagaccatctgaagccaccagcattgtaacacacagtagcagtggtgtgttcagaaagcacttggactccaagatcaaggtttctgccactcacatgggcagacagatatctagraacaaccatgactgtaataacagcagctggtcaccacggagcaggggagtgcctgcaggggaaggagcagcccctgggaaaagcaaatccgctcctcctggcccagggcctgaaacctgggaggctcctcgtcatagggtgggctaagccagctctttcttcctaatgtcagtgaggttatgcacttggcatggcggagagctgccccctcctccgtgagagtgggttagaagatggtggtggtgttaacaaggaaaaataacacctaatgtacacagagctatatccacgggaacctgttctgtggactattaaaaatccaaaattcatgttgaggtcctacctctcagtaccttagaatgtgactgtatttgcagataggacccttaaaaaggtaattaaggttaaagaagatcattaagatatggcctcatcccatctgactggtgtctttatagcaagaagagactaggacacagayacacacagaggagaggccatttgaggacacggggggaagatgaccctctaccagccaaggagagaggcctcagaatgaaaccaacacatctcacaccttgatcttgaacttcagcctccagaactgtgtgaaaagaagtttctgttgtttaagccccactacctgtggccttttgttagggcagccccaacgaactaatacggagtcctattaccaatctttgttatgagagctgcccctgaagtcacatcagttgcatttccggattccaaataccttttccacatagctgggttggggtctctctctgtcgcccaggctgcagtggcgcaatctcggctcactgcaacctccgccctcctgggttsaagtkattctcctgcctcagcctaccgagtagctgggattacaggtgcctgcccccatgccgggccaatttttatatttttagtagagacggggtttcaccatgttgcccaggctggtctcaaactcctgacctcaagtgatccacccacctcagcctcccaaagtactgggattacaggtgtgagccactgcaccccgctggggacaggcttttgaatccttactctttaaaaagaaaaaaaaaaggtgtatatttaaggcctacaatgggatgtgttgatacacgtagtgaagtgatggctaccttccagtaaattcacgtatccatcatctcacatagttacctttcagtttttattttttgtggtcagagcacctaaaatttactcacgtagcaaatttccagcatatgatacaatattattaactctggtcccgtgctgtacctaagagctcttgacttgttcatggacagactgcaactttctaccgtttaacttatatctgcccattttccccactcaccccgcctttatttagaatgtgggggaaacagagactgatgcactgtatctatgtgacgataaaactccatcatattagttagaagggaggagagtaacgttgcttttttatttctggaaatcagaaatcatattgagacaaagttagaaaaagccatctgtgttttgtttggccttgtattggattcattctgaatcgactactaaaaacaaaaggctttgcttcatttcttctttcctttttatatttgaaagcactgtttgggttgtgatttttgtgatgcctttattttattttctgggactgtgggtgattttggcaaagatgtatgacccttaactcaaaagggcgcggtttacaggctaactgagggtgggtttatgagcagcattattctgcaggaacacagaactgtacagacaaggcggaccacagagtggggcctgaagcagcaayctgtcagcctccccttgctgcaaacacctgctctgccccactggatcccaggtacactcgtggccatgtgtgtgggtgggcttgaacattgccactccccctccaagaacaaacaccccctcyccaacactaagaaaaatatcagcatggaacataaacgttcccctcagataatcaaataattcaccccaaactgtccactgtgccgtcactggctaaagcgagctgacttttctgtatacacgccatatcattttcctggattatttcccaaaacttgacagaccttaggaaagctatttttgagactttgctgacagtttttctggacccacagtatgtatttcagacatttcagtaataactctgtgacctcattatatgcgtatttttgtatgatcctgtgggtattggtgtgaggacacaccttgtattcttatttaaaaatcccaagttaaaaacagccctggccttttcgagtcacgtccgtacatctgagtttggactaggagagtgacttagttcactacaacattttaccaaaagatattgaagcaatgttttttccaaaatatggcataacacagaattcttggatttgctgaaatcmtacagatttttctgtgttcgtttgtttgccatattcatgcaggtgatttgcaggtgtgcaacctggagtccagctgtcttgctcttcatgctgggcactgtttgttctctgctcgcccagcacaatttatattacagaactcacagcgaggtggagagaagacacagtgtccggagtcaggagctctggattcgagtgcacattcacccattgataatactgagcaggcaattcaccaaaaccaccttgtgctgcaccctcttgaatagcaacttaatacatgtccrggagccgcctcatatagttgggttagttgagataatgaacttggccagctttgaaacaggaagtttttgaaacttgccggtgtgcctgcatgttctgtgtgtgccactctcatgctgctagcagtgccttgcctgttcttggtgttcttggaagatacctgagctcttactttgactcctcaaggtgtttggttcgcattcattgacaacagtgcagtttgtacccagaggctctgacttcactctgttgaaggttaaagaagatagtggccttaggggagtcatcaggccattctactgaaggtgggtggcatctttaatgcagctggcagcctgtctggggcatggtccttgctcaggacttatttcccttcttttttctcacctttaagtagaaatgtacataaggacacaactagatattgatttgctaagttcagtgatattcaaagtgaaaatgatacatatacttctggattrttttcgttgcaaaatttgttcattctttccctattcggtgtgcattgagtgcctgctaagggctgggcagagtgctagaagacgggaactgtgtgagccagcacaggtgtggagcctgttttctgggagctgagaagttgggggtggagaggaggcacactggacattgcttgagcagccaaatgagatgacaggtgtgatcccagcacactgaaggagaggcacacggttctctaagagtgtgtgaggagacgagtagggctgggatggctgggagctgtgacattggaaggacttaaccatgtgtgcaggaggcagtagcctcctggggagaggcagcagcatgtgcaaggatgggggcccagcactgggttcatcctacaagcatgtgtccgggcctcaaggccactctgatgactgctttccctccctgagcctcctgcagtgagagtgaagctcacgaatgctttgggygtggcatggcagtgtggtctcattgtgtaaggtgttttgattatgtgtggacttttgcgccaggactattttaaatgctggggatgtcgtgctgaataagcctgaccaagcctctgccttcgtggagtttgccttctacttaggcaggggctcagatagtaatccagcaaacctataactgggccctgcaatgtcagagactatgagtgttatgaatagaaatagatacagtttaacaaggggccagaggggcctgaaaggctgcattgctgtgggcagggaggtctgggaaaggctttggagtgtgggtgctggggctgtcccttgaccagagactggaatgatgaagccagccttgccaaagggtcccctctgtgacttgctctgacaccctaatggcagggatctgcctccttgcctcctctctaccacacaaaactgattgccttccccaaggacaacaaaggagaagaaaagaaaacgaagaaatcagaaaggataaaaccaagagagatcaccaaaggcgcgtggtgcaaatactgatcacatcagtaagaaaactgtttccatccctgatttgcttttcttttaaataggatattcagtcatagcttcactataaaattgatttattgtgttgaaataatttccgtagcaggggaactaattggattgtgtagcataaagaaaatgtatgtgggacaatggggaagaattgagccaaaatgaatccaatatattttaatctctgcaatacagattatattttcaattaagaagcttaacttgcatgtgttcggcgggcgggagcttcccagagcacttcycgcatgtgtttatgggtaataaatcacttagcattaagaaggtagacgatcattagcccatgatcactcagttgcctcctgttaatagcaaagtcaatgcacaccatcactgtggccatattcgggtggtaaaatgtggagttacatggaaagtggaactgttatattggtgaatacgatttactagacggaacaaggaaaacctgaattccatcccctgtgggccatggaaagcccatattcacagtcaagtrtgaaagtggcttttgggccacccgtgccctgyctgaaagcagagcatcatgtggccacgtgtctgctcggctctgccttactarttgtgtttaacctgagctctgctacagacagactttggtctttgctccatgcgtgcttctggcatgacctaggagttgcttgccagtgatgggcagagggcgagggcaagacgctggctagcctttgtccagtggtccacttgtctgggatcgcatttcatcttaaagcaacccatgaggtggaggaaccatgatcatcatattatataggccatggaatctgcctcgtgggctgtygtagcagagcagtcaacaagttagaagccagagcccttgtgcactcwtcggtgcccacaataactcattaggttttttccttttcttcctctcagtcccagtagccgtctaagagcagaagcttctggggcctggccttgcagacactgacctttgactcacctctttatgattaagacaagagcatggaagaaataaaggggtcattaaaaaaaaagaaaaggaatctggcaggaaaagcagaggcagatgtggagctggtttaaaaatctatttcaagtctttccagtggctggctgggtaggcaggggccgccaacacgcaggggccaatgcagccaaggagcagttgcgtaagtccttgcgtaagtagaatgagatgcccagggctcccttgagcgcggccacgtggctgggaacctgtcaggttttatagcatccaatcagacaccgtgcaccaggatggagagcccggaaagaggtcagagctggggaaggcaggtgggggctgtaaacccaacagcagtgtgaggaatgggctcaaggcggatggagtgagcagaggtgtcccagggacagtggcgagccygaaactagacatggggagagaagagacagagacaagaataacaatggtagtaaggtggcagatcctcagtttaaaatctggccacgatgccattcacttaggcacttgcttgttctagaaatatttattaagcactaggtgtggcaggtgtagaatggatttgcccccaggaaaccctggatctggggctccgagtcatctgtctacgtcctctggagccttccttgtcgattgtcccttcacctccagattcttctactgcagggaagctcccttgacctcaccctcaccctcactgtggacacctctgttttgtccttcacagccagaccacacagagtggtcccctaggtccccagccttcactcactcttcatctccccatgaggctaatgaaatctgttctactgcagttatcaatggtgtcctcatcaataagcccacattaccgccctcyccagtctcagacactgttgatggcgcccttgctgttaagtgctcttgtccagtagcttccatgaccccgcgtcttgygctgtttccctctggcatgtctcattccttctctccctctcgctctatctctctccctctcctctcctcccctcccctccccgtcctccccctctctctcctcccctctcctcccctcggccctatcctcccctcccctctcctctcttccctcccttcctcccttctttccttcctctatcctcccttctctcgctctctctctagctcatttttttttttyttctgcccggaagaaatactggcattctccaaggctcttttctcagccttcttttttaggttcttattctaaaatctctcttcagtgctctctcattgatttccaaggatttctttataagtggactgagattgagtacaaaatgtaccttcmactcttgaccttcacctgatcccagaccccactttcacctgggtccccaaggctgagcacaggtccctcctatccccaaggaggtgctctgaacccactccccatggctgtggatggctccccaaccttctgcatgaggtagacacccagttacctctgcagcgtccttcccttcagccaaacccctccccccsccgcccctgctaaatttactttgtcaccctttctagaccaggtcagttccagacatgacctggatgctccttctccttaaagagtgaatgagcaagaggctgggcgcagtggctcacacctgtaatcccagcactttgggaggccaaggcgggccaatcacctgaggtcaggagtacaagaccatcctggtcaacatggtgaaaccctgtccctacaaaaaatacaaaaatcagccagatgtggtggcacacacttgtaatcccagttacttgggaggctgaggcacgaggatcacttgaactcaggaggtggaagttgcagtgagccgagatcatgccactgcactctagtatgggagacaagcgagactctgtctcagaaaaagaaaaaaaaagagaatgaataatgagcaagaatgataggccatggcagattggcacacacataattttataatttcccytttttttttttcctggagacagagtcttactctgctgcccaggctagagtgcagtggtgtgatctcagctcactgcaacctctgtttccagggttcaagtgatcctcccgccttagcctcctaagtagctgggattacaagcatgtgccaccatgcctggataatttttrtatttttagtagtgayrgggtttccccatgttagccaggctgatctcaaactcctgacctcaagtgawccacccatctcagcctcccaaagtgctggattacaggaatgagccactgcacccagctggcacacacataattttctaaaccaggggttgacaagctgtaactgatgacccaatccagccctccatctgtagtgtgtatgyatgtgtgtgtcccacaagctaggaatagattttatgtttttaaaggattgaaaaaaggcaagaatactattttataacagatgaaaattatatgaatttaaattttgctgtctatacataaagttttattggcacatagtcatacccattcactttttgtattgtcagtggctgcttttgcgctgttayaatagcagagtctattagtgaatgcaraagagaccatatggcctgcaaggcctgacttctttmctgtctgatcatttacagaaraagtgtactgatcccttgactagactgtcaagaatggaaagtgcactgttaagaatgggcacatcttattcacagactgcaatcaataatcaataatcaatcactctgatgtaacctgagaacatactgtgtagaaagcatgctgtagaggatagcgtgtgcttccccttgtgctccccagtctgtttcacaagttctggatgattgatcaatgctygatcaatgcgagctcccttctccatcatgggaagaatgggaagcctgcycctcccctgtggtgcatctggcatccgagctggtgttcatcgcttccctctctgctgggtgaggacctcgtgggtgaggacttccacataaaaatgaggggtaaggcgcaaacatcagaccagagtcacaggagacattatcttccccgtggccgccctgcctggtgagtttactgatttgcctaagggtggtgctggtgtgtgtcttgcaccatgcctccctccagcctctcagatatgtcctgtccggtggggacgtctctcctgtgtatatttttggtggctgagcaaagtgcttgtggttcctttcagccaattgtgctgaggcaaaggcgggccacttaaattgcagtttctctgatgtatcttctaaaagccaaasgtcgttatccacaaagggtacttttgtgtaacaccaggcactcgagtagatctgtggggtcttccctctgtgggtgatgagtctgggtttcagcatcccgcttcyccagaccacatggccactgatccgtggggtrcacagaaggacaggcagtcacatgcctgcttctttgagttctgccacctacgagctgagtaacctgggcaagtggtgaacctcatggattctttgttgccaccagcaaattggggagagtaattgagagggcatttctgagctcctggctcagcaggtagcatgttagagctgcttgatcaatgcgagcccccttctccttcatgggaagaacaggaagcctgctcctcccctgtgctgcatttggcatctgagctggtgttcagtgcttccctcactgctgtgtggttgccaaagcctcctgtggagtaaggccctgcactgcttcatcctcctgggagagcaggcagtggagcaggatgctgcatacagagctggttcttggttcttgaggagggggagcggtggctctgccagctcagctgtgagtggtcccaggatgaaggaacagcaggaaacaaagatactctcaaggccatggagaagaagtgtgaggtagatgctggcgcaggagcccacggtgggggagaatccgcttctgatgtcttccaccctggacctcaagtgtcaaacagcaagagatgggctgagcaaagatcacccgtctcaaattcagttgacaatcagcaccagccacgtctcctgggaaacatgaagtggccttaaccgtcacctgcctgtcatctcaggcttgccattagtcaggcattcgttaaagaattctgtcaataatagaaatcagaaatgcctggaaagtagatttcttgcagggcagatggagaagacagcctctgggtctccaaacccctttggctctcactggggcttctgggcaggactggggacccatgtacatgtcatctcagggcagctttctttctaaacccattttgcagatgtggcggctgaggtctcatccagcacccagtcacgcctctcttgggggagagccccaccgttgggagctgagcaaaggcaatatttcggttttttttttwaaagatactgtgagttggtcatcactagacttgggtgtaagttaactgttatctcaccactttgctaccaggttataatcaaagaaagtcttagatcaaagtcagccacacacacagacatttatgaaaaatagttttgcacartcagtgcatactgtctgttcttaggcttcataaaacccccttccctgtcatttgaggtgctctgcctgagccttgataaatgattcatcagaagcaaatgagaaagtattctggaggcaagattcaatttgcatggatagtcatcttagggaaccagcatcctccagacccacagcttcttgccactagaacacagggtccagcgttgggcactgtccttcaacactgggcttcctacacacacacatccaatccacgcacagccygggagagtccctgaaacattttagctcatccacataccttgcatggtgtggaattcaacaaggagaacccatttctcttaatcattacrctcattaagaaaacacgaagctcacaacagaaaataatttctaactattattattctgtggtttctgcttttgatcaagataagaatagccgaagcacccacycaggtcactctcatggaatggggttttctgattaaagattkgcaagcaactgacaagcttgtagcacatcctttaagctggcactcgctgtttgagtacttgagagttatttgcagacttcctaagtctttcgttttgctaactgtgtgtcaggaactgttctgggcactctatgcaatgtgagcttatttaatggttaccacctaggaggctgatgtgctcttgacacccatttcacagatgcagaatctaaggaaatctgctcagtgtttacacagccaactggtcagtggtacagcctggatttcatctctgggtgtttattcctggagtccctgctttaaccaccatattaacctgcttctgaacaccaaccaaagcttgaatccagccttccaaatctcaagcctgggcttttgttaaggaggacgctcagggtttcttgatagccgaactcctgtatgtccaggaaagaataaagaccagatggtcttgatatgaaaaggcagcagattttaactacaaaatgggaaatgagtaattcgtttacgaggacaaagtagtgaaaactgttcttaggcttagggtaggtgattatatcttaactctttgaatgttcagtcaaagctatatattcaagatattgtgggttccctaccagaccaccacgaaaaagtgaagtttgcaataaagcaagtcacacagattttttggtttcccagtgcatatatgttatgtttacactataaagtattttattaagtgtgaaaagtatgtcttaaaaaaacagtgtatataccttaatagaaatactttattgttaaacaatgctaacaattatctgaggcttcagcaaatctaaatctttctgctgatagagagtcttgcgtcaatgttgatggctgctgactgatcaggatggtggttgctgagggctgaggtggctatgacarttttttaaaataaggcaacagtgaaatttgccacatcatttgatgcttcctttcactcaagatttctctgtagcctgtgatgctgtttggtagcattttacacacactaaaacttcttttcacatgggagtcaatcttctcaaactcggccaactgctttggcaactaactttatgtaatattctaaatcctttgtcatttcaacaatgttatcagaatcttcaccaggagtagattcatctcaagaaaccactttctttgctcacaagcatgagtgggaactccttatccatccaagttgtatcatgagattgcagcaattcagtcacatcttcagagtccacttctaattctagttctctgctatttccactacatctgaatttacttcttcctctraagtcttgaaccggtcaaagtcaaccatgaagatcagaatccacttcttccaaactccagttaatgttgatattttgacctcctcccatgaatcatgactcttctaaatggcttttagaatgctgaattttttccagaaagttttcaatttactttggtcagatccattagagaaatcactatctctggcagctatagccttataaaatatatttcttaaataataagacttgaaagtcaaaattgctcgtgattartggactgtggaatggatgttgtgttagcaggcatgaaaacaacattcacctccttgtacatctccatcagagctctgggttgaccaggtgcattgtcaatgagcagtaatatttttgaaaggcatcttgtttctgagtatcaggtcttaacagtgggcttaaaacattcagtaaaccatgctccaaacagatgtgctgtcatccaggctctcttcttgcatttatagagcatatgcagagtagatttagcataattcttaagggcrctaggatgttcagaataacaaataagcattggcttcaacttaaagtcgccagctgccttagcccccggctatagagtcagcctgtcctttgaagttttgaagccaggaattgacttcttctccctaaatatgaaagtcctagatgacatattccaatataaggtggtttcatttacattgaaagtctgctttttagtgtagccaccctcatcaatggtctatcctaggtcttctggagaacttgctgcagcttctccatcagcacttkctgttcaccttgcacttttatgttatggagatggcttctttccttaagaatcaacctctggtagcttcaaacttttcccctgcagcttcctcacctctctcagccttcccagaattgaacagagtttagggccttgctctcagttaggctttggcttgagggaatgttgtggctggttggatcttctattcacaccactgaaactttctccgtaaaaaagtttcaccactaaactttgcccactgcaagctgagaagatccttcggagacctctttggaaacacatagcaaagaaaatgacagaagccgccatctcttgtatctttaccatgctttcaacagtagctaccaattattgaacagctggtaggacccagcctctctatagacactgaggcttctaatckccttcttctcaagacctcaataaggaaaatgagttcagagctgttattaacttgaggaaggttgcacagcctataagtgacaggacatgaatcaatatgacctgtcacttatagatcacttatgaccttgaggctcctgctctttctagttcttcatttctttgtgtgtttcctgtagctcttctccaagggcacaccccacatagagagacccaccaggcctggcttgagtgaaactaaatgcgtagtgagtagaagttgccaagcaccagtgagaatgggaaaatgtggacaacgtcaccacctgccaggtagcaagcacctaggctcctacaaatgggcaaaaaaaaaaawaaaaaaaaaaatcggtctcagttttcagcctatggcaaatgagccttcagcaaatgacatgagcatgctaaatgattgcagtgtccatagcaggtcttgaaaatgaacccggataaattttaagcatcactggtgtatgctgagcgtgaaataccttgaaagcagcattctcttttgtaaggatcctattttctcttaagcatttctgccttgaaccgtatggtttgctcaaggcctctgactacttcctttttttctgggctgactaggattcatttacactgtttttgtaaggatgcgttgctggatgctgtggggaataaagattctgcacagatggaccctcactgtattgttgtagaccaggggccattgcctgcagggacctctgtcctgggtggtgtttggtgatcagaggcttgccagggatggcagggacgccagggacagcaaggacggcagggacgccagggacggcagggatgcgagggacggcagggacgagagggatggcagggatggcagggaggcgaggtctctggttgtcgtgattgggcgtctgggtgtgtgtttgtttatgcttgtttattaatgccccacctacttccagagagatctggttctctgggaagtgaaggttagagattcttattcccgggttgttttgatttattttttaatcatgaaactgagtcacaccaatggtacagatatgaacagaaaaattatgagtcccatgcctgcagtttctgaaacatgccctctttccttcttgtgttttttcttttttattgtgattttatatatataaataaatattatatatatgtaaccacaatagaaaagaaaaaatacatacattacaaagtttgccatttaaccgtttataagtgtatcattcaatggcataattacatccacagtgttgctcagttatcactactgttgatttccagaatgtttgttcaccccaagcagaaactctcaactccctgttcccatcccccatgtatatggaactaggaaaagactccagtggcagctgatgacrcacattcctacaccccggcaagcagagcatccaggacaacctgtcctgtgcccgaggggtggggcacggtcaccctgacctcccctgcttcccctgcccatccatggctgtccttcactcacccaattagtgatcataggacaacaggaggagcctgggagaggaaggaggaggcctgagggatggacactggggtgctgaggcggaggtctctggggtgagcagacactggggtgctagggcagggtctctggggtgctgtggtggggatccctggggtgaacggacactggggtgctggggcagaggtctctggggtgagcagacactggggtgctggggcgagcagacactggggtgctggggcggggactctggggcgacccaagacccttctttatttgccgggatggagtcttacagtcaggctttgccctctctcgcggcctcccccagcagtagagacttctcacttcctgatgttcgctgctggacatttctgatgtgtttgtcttggagatggttttttcattacccaagctgctgctaaatccgtcaacatttattttgtgaagttgaaataggtggacgaggcaggattgggaggaggtagaggcgaataagaaggaccaagtagtggagagtagagggagagtgggtggccttatgatattgaaaacacaatcctgaaattagactgttagtgatgacaggcttggtgctctggaggtgaagctgagggtacctgcctaccttgatttccagactggtttatcccaacacttgctaactccacgttagggctcttagtggctaattgtctctaagcttgatttccagactggtttatcctaacacttgctaactccgmrttggggctcctagtggctaatcggctccaagctttggagggagcattttaaggtcttttcaatcaacacattttattttctgatgacctagaaacaggtgtgaactctccgactccccaccaaaagaaagtagatgaagaactcttcaaaatttgtagagaggacatatcagaattgaatcacaacttttcaggccttggcaaaattttctttaaagaaccaacacaggcacacctactcagcactgctagtgtagtggggaaatggctggctaatccctactaaaagagttttgctgtgttctaataaaactttatttaaaccacctcacaccgattaggatggctacatcagaaaaaaaaaaaaasagggaaataacaagtgttgatgagggtgtggagaaattggaacccttgtgtactgttgctgggaatgtaaaatggcacagccactatggaaaatagtargatggttcctctaaaactttaaaatagaattaccagatgatctggcaattccacttctgggtatcatcaactgaagaatcataaggtacataaatttggaaagcagagctttatttctcataaagggttgcagcctgcaggccagccattccgcagaccaggaagcgtagcctccagcttctgccaagagcaagcactyccagggaggaggaatgagacaggaatttatgctgagtgggttggctaagtatacataatcaataagctatagaagaagtcatgaatattaatgaaggagaaacacacacatgtgtgattgagccatgcctcttcgtgggtcccgtgttcaaaaaaataccagcattaggatgacccaagggtggaggttttggccctctgatgtcaaaagttcaaacagaggccacgaaaaccctcactgcacatcctccttcgactggccagagccaccctgcagttggtagcctctcagcaggagggcatgcagtgtcaaactggcaagctgtcacgtggaaactgcaaagagggagggggagtccacttayggctcagacaagtggctaaaggtgatataggaatgagttgtctgcttcttgttttctagagccagtttctgcttcctccttaggagagaattctggttaaaggctattaaggaaagggtatactgaagcgggtccaacctcccatctcttcatggtcatgggctgactcagtttttgttgttgttgttgtttttgttttttkttgttgttgtttttagacagagtcttgctcttgttacccaggctggagtgcagcggcgcgatccagctctctgcaacttctgcctcccaggttcaagcgattctcctgcttcagcctcccgagtagttgggattacagacgcctgccaccatgcccgggtaatttttgtatttttagtagagatggggtttcaccatgttggccagattggtyttgaactcctggcctctggtgatccacccaccttggcctcccaaagtgctgggattacaggcgtgagccacggcgcccggcccggattcagtttttaagtcttctctggggtccctttggccaagaaggagtctgttcagtccattgggaaacttagrattttatttttatttctcaatatttatccaaaataattgaacataaggacttgaagagagatctgtacactgatgttcatagcaacatttttcacagttgcsaaaaggtagaagtactcaagtgtccatcaacagataaatgggtggtatacacgatgtggcatatgcatcccaaagcctccatttcctcatttgtaaaatattgtgtgattcataccccgcaagacttgtgagcatgaaataacatgatctgtgtgaaagcaatgacagtgtctggaacttagggggtgctcaccaaatgcctagcagcaaagcagcagaaactagaggtggtcgtgtgggagaggatggaggaaccggtggctgggaactgcctactttcaggatttcttacctttggcccacgacaattccttggccaggaatgctgttttggtggaaactgggatggtatgcatccagcacgtcactctgtttattaggcatcagactggtagacaagggcccagtaatctcggctcatggagacccaagtggggatgacacggcctcaggctagagcagacgcaccctgggaatcctctgtattcttgttggcatcacagcccaagcctgtgyccagcagggctgaccagaagaaaggtctggggcattttaggttttagttaagagtttgatggaggcttaagcttttattgatttgaaaaagaaaagaaagggaatcttggaaaaaagtaactcgctgtagtgcagacaggaaataatagcaatgaaatcttttggcttccctgctcctgaccccagaggtcccttcctcgctttaaaatcctcaggcaccccctccacccctgttgcccacaagcaaatatgcagactccagagccccacatccccgtctctcacggtctggcccagttgatctctctcacctcattccgaaaactttctagtgacattggtcttcccaccrtttcccaaatcccaaagacacgaggcagatcccacccagtcccccagctttgcattactttgccsttgtgatactgggggacgttcttagaagtcacttctttccacatatatggtttttgtttcccagtcaaggtcccaaggtaggaagtttctggccatgtgagtcaccacctggatgaaggagccaccctgccaagtgtggggaggtgccaggagacggagcggctgagatgaagcattcattatctctccttcccatggaactgaagtgacattctctgcatctctattatcacttcacctcaacttgcctcttcccagcatccctgaattatgcagaaatcatttgaaggcaaattcccagctactgttgctagactcatttttctgcagggatggaggaatgtgttgctagactcatttttctgcagggatggaggaatgtgtcacttttaatttgtttccttttttcccacccattttgggtaaaacattgtgttaaaagatacatcgtctccacccccaaagcagcctgtcttcatgcccaagggatttaaatgccctcatattgaagtgtacaagctaattatgtaacttaaagtaagtttagggaaggaatttaaatacccccacagcttcacaatgtgagaaatggggctgtgcaagcccctggaagttccctgcctttctccacattctccctctgtagtaatgaggctcctcatctttctgttttattggcagcaaacactgggtaacaggggtgctagaagggcctgagggtctgtcataagcaagggcctataattgtgccaggagcctggaatagttaaattggttcctgattacttttcactcgctaagttcccctcagctcaattaacatataattatttaggactatgctacttttgttactggcacatggctttccaaataggcagctttgggggatgatctccctctggagcccacgcactgcatccatccacccgccctttttgttcaagaacaaaagcaaggctggcgggacctcctccagaaccttcatgctgcagagaggcttggaccttggcaggtgcctcctgcaggcagagcctcgccggccacaccagcctgtctcccaaagacgcgcagaactgcagaattcacagggcttgtctttctcttttaccaaatgcgactttacattttgtaaggtgtcagtggagatcatatcagtgttcagataactttgtatcatgtggtgatgcctcttccttacctttaatctcaaaaataaaaaaacaaaacctgtaggttcaaagttccagggagcttagaggcactggggttgagtgctttcatttgtcagtggagaagatgagggtctcgaaaacttgagcaacattttttttgttttaayatttttaaaattctattgtaaattgacaaataataattgtgtatgtgtatggtatgcagtcgatgttgtgatacatgcattcattgtggaatgattaaatcaaatgaattaacatgtctgttccctcacatacttctcatttcttggtggtgttgaacaacgttccgaaggtcaggtagctccacgtttaaatggacatgaagycattgatagatagatagacatacttgaattaagactttaattgtacaaatgtgtgtatgtgtaggctacaattaaactcatatttgacactgtcaagaattagtagtttttgttgctaatggggttaaatgtccaggataggaaagcttactggtttgttgttgctttaattgcattggcttgggagtgaacccatctccctttcttattgacctcacatttttttaagtggataatgttatgacaagtttgataaaaatgatgcttctgactttctggagacaggaatcaattaccaagaagagataacatttctctccattgagccattaaaaataaaattcacaggcttctagaccttacggctttttgaatctttttaggttgacataatttgcctgtgattctttctggattatttatttgtatgtttggttttatctcctgaattttagattacaaataatccttccttagattttgaccatttttaggacagcattcctgaaagcatttaattctcacagcatttgttattgttttttagaaattaattaattaattctcctggctcagaataagacataatttgtgtggttcacaaggtggttgatcccttccccctgagtttctggcatttctggtggaatccctaatgagaagtttgcataagaagaacctgaagagagctgaatcccaccgcagaaaacctacacggttttctgcaaggactcagggagagccaggggcaaccaaatactctagcctccctgaggcctctcatttgggccagagcctgaccttctgagccagctctttcatccattcattcattcacttactcttccatccacttattcattcattcctgtgtcagttacctagtgagcatatactgtgtaccaaatgctgacttggcactgaggacacttaggtgaacaagcaggtgttgccactgccttcgagatacctatgctttactcacaatctggagggcttctcttacctaaacccaactccagcagtgtccagcacagatagagttgtcaggatgcagagtcaggcgcattcataccccacacgccctcgaattgcctgctgggcaaaggactatgatcctgcactgtgtggagcccctcatttcatttggcaaggcatcctcccatccaaacacttggcttagcttgcaatccttctcatattcctctgtaacagaaagcggattggtatgcaaaagcttctaatatgattttcttattttccctactttcacatttattagaaataacttatgaattacagtaactaatagattttttttttttttgagatggagtcttgctctgtcacccaggctggagtgcagtggtgcagtctcggctcactgcaacctctgcctcccgggttccagtgattctcctgcctcagcctcctgagtagctgggattacaggtgcacaccaccaggcccagctaatttttttttttttttcttgagatggagtctcactctgtcgcctaggctggagtgcagtggtgcaatctcggctcattgcaagctccacctcccaggttcatgccattctcctgcctcagcctcccgagtagctgggactacgggcacctaccaccatgcccggctaatttttttgtattttttagtagagacggggtttcaccatgttagccaggatggtttcgatctcctgaccttgtgatccgcctgccttggcctcccaaagtgctgggattacaggtgtgagccaccatgcccagcctgtaattttttttttttagtacagacggggtttcaccatgttggccaggctggtcttgaactcctgacctcaggtgatctgcccgcctcagcctcccacaccacactcggccgactaatagattttcttacctaaaagttagtctctggttatgtttctccttgcctcattgggtgattggcccggggcatagctgtgtttccgtcccgtcaggtgtgggctgtaggatatcatttatgcatgtcctggaagtttctgtgcaagtgacgcagcccttgatgcattgagcccaagcatcatctgatctttgtttactgcactgattatggttttatttgatctttccttcagctttcctcatgctacttgaatttccacgttgtttttgtcccggcatttaaaaaaatttatagggaatctgaattacagaatctacctctcagccctgcactttctcagtcgtcagtttcttaaaaggtttttgttcagccttcacattattttagcatgacatacatagtttttttkttttttttttaatttgagacaagtctcactctgtcacccaggctggagtgcagtggcgcaatcctggctcactgcaagctccgcctcccaggttcgcaccattctcctgcctcagcctcccaagtagctgggactgcaggtgcccgccaccacacccagctaattttttgtatttttagtagaaacggggtttcactgtgttagccaggatggtctcaatctcctgacctcgtgattcacccaccttggcctcccaaagtgctgggattacaggcgtgagccaccgcgcccagctgacatatttctttaagtcattttgagaactgtctttatttaactagctgcagttgtcccagagcttaattcgaagcagcatattgcaactgtttgggtgctatcttgaggcacaataattaccctataataataatgtgtgttttagtaaactggtcattattgtcatagagggctggaaagagtgtcttcttaaagctcataaggaccctagggtactctgcaaatagcagagttctaaacctgaaggaaaaaattaaggggaaaaaaaattgtgttagtggtcagaagccccgtgtccttatgcatcacggcacagcccaccctgtaatgacaagaaggtgttgtattccactgacacttgggggcttttctgtgatctctggggttgctgcatgtacatcctcagaggctctctcaacacagttaccaagggtcaggtgggttacttagaccatctctctagctcatactttgtacttctgggggctgaaggtgacaggacagaccccatcccaagactggggggctgattagagttgccaggcatcccgtatatgcaaagcatgtcctgaattttgcaacttttgtcctggatcctttattaatttgtcaggatgctctaaatgtcctgtattccgctttttttttctaatcaattacagaattcagcaataagagctttattcaaatttaactgggcatcctatatttgcaaaatctggcaaccctgcggctgaggaatgttgctgcccagcctgtgttcttggttaatggacaaggcagcaatgcctgcgtccctccattaatagtcacttagaaacactaattcctcctttctggttatattttaatgtccccggggaagaagtcaaataactccacctgcagttttctttagtgaccaaaattgcaaactctgtcacaggccctttgtcacagctgttttggtcccagagctagccgataggtttcttgatgaaataatgtctgcgaatccctttctcagagcggcacgcagtgtgagcgtgagagaatctgcagtgacagcgggtgatgggcgggaggtggtggtggcaggtggcgatggagacctccttaaaaccccaggtggtgaatttcttcttccctcctccctggctcactgccttttagcggctgtgacatggccagggcgtggggagcttctccaggcacgcttggctgaagagataatgctgtcagaggacagcagttactagtaagtaacctacatttcccttctactctggctgctccttgctgtctaaatagagaaagtggaattargtttatcatctgtgacctaatactaattcctcttacatcctgcctttgtgcaaagggaaaagggccatttaaaaagtagtggacgaagctttagtattgtaagcactttcaagcgttataaaacaaatctgttgaatgaacaagcatgtgagagttggtattctagagtcacgtgtgatcgcccaaattgtatatttcattacaaaaagtatataaagtcatggtattatagagtgttaaaattatactttatcaatgaatcaagaaattaaaatttctgagaaaattcttgtcaaatcactttcatgtctactaaagcttttaacttcttctctagtaaaatagtggtcaaaattagcatgtggaaagtaggccaatgatactgaagtcgtaagccatgcttccaagcctggagatattgcagcaacctcttccaagcctgacagctccttgcgaagagtgctttcaactgggtagcttgaaaaagccagctaagcaaagatcagtggaatcatagaacattaagacatggcaacttgagaaaacgatttaatttgcacctttttttttcttttttttaattagattttgttttaagtcatacttttcaaatgttactttcagaagctgttattttggtctgtttctttcatcctgcatgtgctaatttccttgattaatttggagaacatctgcatataattccktgatcttttcgttggcaaaacctcacagctttgcgcaagacttggagagttcacattccagacagtctgggattgtatctaattgaaatgccaaacctaccgaagtgccagagcgtaagtgtgtaattatgtaattttctcttgatctttcagagtcttcctgcgagcaattaatcagtatgcagatatgctgaacaaaaaatttctggatcaagccaactttgagctacaggtaagagaagagktagacacgacctttgtggagaaatcatgttaaaacaaattgctggtccgagccagtatcttacagtatttctaatccttgaacttaattggtctcccatccaagatgcggaaacggaatttgtagtatgtactattggaacctgaggagtgaaaattatacttttggagtattcgcttaatttagcaaggaaagagatagagttgtttcagagagaagctattgaatcagagtgacaagaagggactcttcaagcagggaggccaccaagtcccggtgtgtgtatctgccaagattgtctcagcccatcttactgtggagggaggatcagcagaggaggagacccaggtctgcacctcgagctcagcttgcttttataactctgtgttccctccatatcctctctcggccttgtgctactagcagtggcttttaccaggccagagaccctgccccccagaccccatggtcctcagaaatgctcctttggtgaatgcagtgtgtgagagagagagagagtgtgtgtgtttgtgtgtgtgtgtgtgtgtgtgygcgcgcgcgcatgcatgctgtaaggattgattttgcctggcctgatttgtgtgtgtgtgtgtgtgtgtgtgtgtgtgtgtgtgtryatgcatgctgtaaggattgattttgcctggcctgatttcttactgtgcatccaaaatgtgtggctctcacttccattgtactctggatgtgtttctgctaataatgattttatctgtcattattattacttagtttattttagtaaagtatacaaatttttgaaaagcatgcagatacaaatggcatgtttatttccygggcaagatgattcactctctcaaaaggaacccgaaggatttttgttcacccattgggtgatccaaccccaaaataagttacccaatagcaaataataagtttacccaatgctctttcatttgcattgcccttatttttataattttttaattttaagtgtttgttgtattggcattacaggatataattagataataatatatcaggtgccatatatctaaacatgttacttgtttataaaattttttatcattttctctgctgaatgcctgttttcatatgtcataataacatactttctctttatacaatatatatgtgctgaatatcagtttagcaggtaaaataggaaacattccttcctaaccctttgctgcctctcactgcccctctgcagggataacttttaactcattgttctgaattctttgtcacgctttcagcatttatatgggcctgtgtgtgttttttttcagcctttaacatgaactggatcataccctgtgtttttcagctctgtcatattccacgatatgaatgtaccaacatttattcagccatttctgcactgataacctagaggctgtttccaggtgtttacaatcacaggctgtgctaccgtgagggctgtgatacatgtgtctcttagtacacrcattgctatggaaaaggttgatctctaggccaaatgatatgacattttaagtttgatggaaaatgatcaatttccttcctaacatgattttagcaatttgccaccccaccaaccttgagagcagccactttctatctagaatcttcttcaacactgatttaaaatgattgatttttgtttttattgtcatttttctgatgattatttaggctaagaatacttagtggccatgtgggtttctgctgtgaattctctgatcatttcttctcctaacattcgtatttggctgtcttttttataagttggaattcttgatataggctaggcatgggtttaggcttatcatatagaaatatttcatttttctgtagtgaaatctgttatttcttttacagctatctggtttcatgttttacttggcaaatctctccttgccttaatattatatacttctaaattttactgttttgtgttagttaggatctgctaatacctgtgtggttttgtgtttttgtttttatctttcaggtgtttaatccatttgggatttctgtagttagtataggggtaaggatctaacttcactttttcccacgtcatttcatgaatagatgactctttccccaatgattggaaatgctacaattaacataattataaatgtatgtgtgtataaattccattttctgtgttattatcctagaggcttaatccttatacctttgtacccagctagcagagtcgctacttttccactcgttttctactgcagaattatcttggctgtttttgtgcatttcctgttccatttggagtttaaaatcagatagctgagtttctcttttaaaaacatactgcttggattttagctggaatcccattgaattgataaataaatttggagtaagtttatggtatttgagggaatactttgcagtatttttttccccatctcatactagactatttaagtatttgttttgccatttttctggtttttttctaggtcaggtctcacacatgacttgctgggtagattcccgtgtgttttagttgtggctgctctggtgggggagcctktttctcaacatgttggttctccctggctttcgtcctgtttcatgaggatggccccttggactctcaccgtgagccygcacaccttacaagccacgtgcttcagggcccacatcgagcgtcgccccttggcaggtgtgacacacatatttattgttgtttgaggagggtttagcaggaatcgctgcctgctgtcggctgcattctgagagtcacagtcaggggcccatctagcatacgacccatgtctgcatgtacccagcacagatcttaatttaaacaccaccgtcaccaccatgagtgctctggctcaaaggcagccctggtcctatgtaggaaaagaaagaattaggagttggtgaagctgtcatttaaaaagaagcattcgtgttttgttgttgttgctgctgctgttgctgttgctgttgttgttgctgctgctgctgctgctgttgttgttaaagggagcaggtagaaatgaagatctattgtgagtcctcgcaggcatgggtcctattctggctgagcccctgaccatgattctcagaatacaggtggctgcagccagtgattcctgccggtgctgtggcaaggctgaaatcggtgggaggtgtcagtcccaaaaacaaaaggaacgacttgtattttattgactggcactcccctttctttataaagggggctaaaaaaaagagagccccattgtgggctctgaggttgggggtgcctggctcagacccccattctgcttcatgtgttacctgtagctttgggctggtctctaaatctcagctctgcaatggggataacagcacctacttggttattctgtggtratcaaatgagctggtgtattactatagaaagtgtgctgttcatgggaagtgttggataaatgcaagcccaacagacttttctcaaatcctacaaatgctcttaaatttccccttacttctcaggtaattaaaaatagagtcaatataatgttcacactttatttttatagaactctttgcagctatctcctttgatataatacatattatccctggtttgtaaatgagaaaactgagacctacaactttcttcttctaaaggccgttgtcttttaaaccgcatatatgtagtccataaacccttgaaatatgggtttattgaaasaagaaatgtttgatctctttacatttgttttccttgtctagtgtatgtgtgatttgggggtaaagagtcctaaattatggaaatctatactattcttaagtgaggagcttcataattacattaataaaagttaacattggccaggcatggtggctcacacttgtaatcccagcactttgggaggctgagggaggtggatcacttgaggtcaggagttcaagaccagcctggccaacatggtgaaaccccatctctactaaaaatacaaaaattatccaggcatggtggtgcacacctgtagtcccagctactcaggaggctgaggcaggagaattgcttgaacccagaaggcagaggttgcagtgagccaagatcatgccactgcattccagcctgggcaacagagggagactccatctcaataaaaaagagctaacattgatgaagtgcttacacatgctctgtaccgccttaaattctgtgcatatatttacttctttgatcttctgagcactcctataagatagatactcttgaaattcacatyttatccatgaggaaactgaggcagagagaggttagagtctgagtaaatggcagacccgggatttgaatatgtgcaccgtgacctctgagcccacacgctaaggcctgaattacaccgtgggtggctggttagcaacatgtatagagtgagtgtgggttttttttttaacttttcagaagtgtgtgctgagcaaatgataaatgtctgagagcattgttgagatcctatatcaagctgttcaacaacttagcatctcctcctttttggttttcagctgtggaacaactacttycacctggctgttgctttccttactcaagagtccctgcaactggagaatttttcaagtgccaagagagccaaaatccttaacaagtaagttctcatctagctctgaaactgcaggcaggagcctccaactctaatcgcataattttcatgtcatttctaagccaacttgatacaaattgagatgtaatcacggtgtaatgaaagggtggttttaaatcaccaatcaggtattgccttttctaacccatgaatcaagatctaaaattgcaggactcatcctggaaggttccaggtcagtgtaatccaagactattagtgcaacacagaatttcagcttcyggagataattccttttgctatgcactattctgatgtcatttcacatgtggttgactttattgcttaattcttcaattcgaaaggagcttctgatgaaagctcttggctctattgggattgttgaacagctcactggggagttagagctatcrgggttccttcttggcagcagataacccctgtcttcttccgggcaggagctttgaatggactgaagcggcaccttctatcattgtaaataaacctctccaaagctccatgaaagccgagatccttgccggcccctccagctctgtaaccccagtttgcatcatgcaccgctcatgactcagtatcaagaagcaccattgttgcatgggtttccttcccctgtttggacacccggagggtcttgcttcgtctctttctgcctccgtttcactaatttctcactgctgtcggtgttcctttcataagtccttttgagaagagttctgaaattgcattggtgttgccacgtcatcagtctctgtttgtcattttataaatacctctgcaatatctcgactgttctaaggcttggccaactccatgctgctagctgaggttagagattccagaaagagtttcagaaggtggcagctgctcttatatcctgtgagtctgtatctcactttcaaggcaaatccaaagcacatcatctctggagagtaagaattatagtcataagctgggctctggtgctcagccagtagtggtaataccagctacttaggaggctgaggcaggaagatcacttgagcccaggaggtcaaggctgcagtgcaccacgatcatacctgtgaattgccatgcactccagcctgggcaacatggcaagaccccctttcaaaaaaaaagagaagaaagaaagaattatagtcacgyactgcataaccacagactacatgctgtatttttactgtaacttttctttgtttagatacacaaatactcaccattgtgttacatttgcctgtggtatttattgtagtcacatggtacattacaaacatgttgtacgggtttgtagactagtaacagtaggctataccrtatggccgakgtgtgtagtaggctgtagtatctcagtttgtgtaagttcactcagcagcgttcacacgacgacaaaatcacccagtgacatatttctcagaacatatccctgtcattaagcaaagcatgagtatatttcagcaaatcatttactcagcctgtactttatgtcagtgactttctaagcatttcatgtgcatttttcttctataatcattaaaaagcaaaaccattccttaggccctcgtatctgccctagtttctagatgaggaaggtcacacacagtgaccgagccacttggccagtcccacacctagaatgtggcaaagcagcattctaatctaggcgattcagggcccacgattttcacctgggctgcttttagaaccttcgagcttttggtctgcacctatctaagtaaagatcacctttcacctggccatctttccttcaggcctcctcagctgggtgattcctgcctgacagccatctgtgtaaacagtgatcattgttcagaaacaagaaatgcacttgctgagccaagcactgagaatggtgtaggcagagtgggtgctcgcctgtgactaccgaagcggcacgcagcagctgcagcccaccaccttggggcctgcacaggtgtctgtcgctcgtcctggcttccagcatcaagagacagacttctccaggctgcatcttctggagactggctcagcaggggcgcrggctcctsctttgtggaatgcacgctccctcagggcccaggggaagggagggatggtgctttgtaattgttgctgttcttgttgatttgcctttgtgctgggaattgtagtgcagacggtagtgaccaacacacacaaagcacagtgcggcacaacgcacttcaacgcactgtaatccaccaggtgcggacacacctccttcagcacrcrccccttgttgtcccgtccagcaaaaggacagctcggccacagcaggtgaagccacctgcccaagtgtccagcgcccgctattgggtgaagctgggacccgagcccagccacagctcctggcctcggagatgcctgcgggagaagagaggtgaatttaaactggaaatctgcctcaaaagagctggcatcttcttagtggtggggccgagcaccccgcaagccccagcagggcagctgtgtgctgggcccttccttctgttggtgtgagcgttaagagcctaaggcaacatcaagacatgcactaacagcggtgcggtggctcatacctgtaatcccagcactttggaaggccaagatgggaggatcacttgagtccaggagtttgagaccagcctggacaacacaacaacacccccttctccacaaaaaatasaaaaattagccaggtgtggtggcgcgcacctgtggtgccagctactcaggaggctgaagtgggaggatttcttgagcccagggggtcggggctgcagtgagccatgatcacacgactgygctccagcctggctgacagagtgagaccgtctgtctcaaaaaccaaaacgaaaagaaaaaaaaacattaacctcgaagggccttggctactaaagaaaacgtttgcttcccacgtagtggcgtggattcagaatcttcaaagccacggaaaattacacacagccagctggtgtcgccccctcaggagccacccagggcctctgcctagggctttcgtattctctttgtcacaacgatagcaacaggagactctggatttcccccaggaaagtccccaggcagttcagaagttgtctttgcaagacactggcaggacagcctcagggctttgtgctgtctgaggggcctctccaggggcatgagttctgctccgcttgtggaggtgacaggagatccaggacaaagcccccggagcctgagataaggctgccttgaccttcaggccacgcggcacacacgtgtggagggtcagccctatttgttgtagtcttcatgccacttgataagccttcagcccttcatagtccatttgcaaattttatttctaaatagcaaaacctgcataagaaatacatgacgatgtcctaccccaatgcttaaattttctcaggcacatacagtgcctagaaatgtgatttgtttaaaattgtccgcataaaagggattcagtgcccactctgtgctcagtcgggccatggtcccggtgccggggacaaagacacagacctcgtgacgaagaaggtcatggtctagtggggtaaatggagaagcaaaaatcatgagtggagtggggcacgcatgcagtggtgacggagggccttggcagcccggagacggcccgtggggctcagccgtgggagacagaggcctcctggcagcttgggcttcccggctgggtggtgaaggcagctgagaggtttgccacgggacatcgagtgccaaagggcatggcgccatctacatatgagcagagacatgatctgggttgtcgaagtgtaagggagcagcttggagcttggggcggggtgtgggggctcgtggtctgggagtcaacctcacactctgggcaaacgatgggcgctgacttggagccccgtggagcttgatgcatgcacctgtctgtttctcgggggaaaggcatgtggtataaaggtggagccatgacacacccacttagtaggctcagcactgcctccatctggggcctgtctcttactctagggcttgtgaatccaacctaaggcatctgagggagcatccccaacccctcagccttcccttcccttcccttcccttcccttcccttcccttcccttcccttcccatcccttcccttcccccttgctaagcccttgcagctcctcacatctgcttggtccacagctttgtggctcaaaacaatagaaattccagcatcaggaaacctgcctgctccatcctcctaatgactgaggttggggagataattaggattttcattctaaagacattccccaaagtgcatgggagtaaataaaagaatgggccataccacgcagagaactgattatgtcagacccaaattgagtatgagattcgccagtgtaccacaaaataaataacccctaggaatcaagtccataatatgaaaatttaactggctcaaccttcagacatccttggtgctagtgactcccaaggaaggacagagatgtcaacagaattctaagcctgaccagcagctcttcctcccatcccagccccctagccttttttacattattggggtgcaggaaatatgtctaaaatgtaaaaggaatgacttttgattagcagccagcttgataattttgttatgtaagacacgtgcatcctggtgtgggacagtgtgttgaatgactgcaaaggagcttctgtgttcaggaccggaagaggaacagggttcatgaattgggcctcccacatatctaagcataaaatgctcacttaaaatttcagcgcaagaggttaagtttgatggcaaagtccagctcagtgcagagagaccatccacaaagacctccccacctggtccctaggctgttttcagttttggcgggggtgggtgggttgttyttgtttttgtttttttgtaattatagaagtctgcagtgttctaagaggataggtttcacaatgggaccaaaatatccccatctgaccaaacactgggttctgcagaatcttctccagaagattatgtcaaactctagatactacctttaaggaaactaacaggaaataaacatgccatgcatgccgttttgcagcgtgacctaatcagaagctgcaattgtatattcctgattataacaggagatacgatcaatttaatttgtgtctgtgctcatttttttcaagagactgaaattattcaaaattaaattcacttattagaaggagactcagggagttagacttaacaagtggtgacctgtgccaacttcaagtcagaaaagctcactgtgtcccacatgcaccggtggtgttgtttttgatgtcccaccccctctcacctctttaggaacccaccagtctttcccatgaagttaaaaatgcctcaccccagccatgagctccctccagcttcctttaggtccatctcagccctttccttgtctcctttccccacctcccacccactccgatgctggctctgggcactgcattgccccagaacctcagccaggtcctggctgcccccaagcagatggagggtattcagctccctagatgttctccccacatcctcaacatgtttcttctttccctccatctcagaacatgcttttcttcgctctcaggactctcctgagcttttctccaagctttttggtgtctgctctctcttgtcagattcctacccctgcaccccagcatcaagtggcggtgggggttccgcacaccttggtcttaggccttcacactctattctctttccttaggaaagcatttttcaaactgcaggtctcaacctttgattgggtcagaatattcacttaaagggccatcatatccatttcctaggctggtctgccataacagtgaacacaaaccgggtggcttgaattgattgtctcacagttatggagggcagaattcccaaatcaaggtgtgggcagtgttggttccttctggaggttctgagggagaagctattccctgcctctctcctggcttccggtggctgccccggtctttggcattccgtggcttgtggctgttttactccaatccctgccccaycttcctgtggccttcttctttgtgtcttcctatgtgtctgtgtctctcaatctccctctccttataaggacagaggtcactggatctagaggccactctactccagtatgacttcatcttaccttgagtacatctgcaaagactctatttccaaataaggtcacagtcatggataccagggtttaggacttcaacatagctttaaaggggagacaatccaacccacactagtcatgaccaatagacttttcttttcttttttcagtgaaatagaatctaggaaaaaatatcagcattcattgcaggcagtaaggttaagcatcatttcataaaactttatacacatgcatgtatattaatatatgtgctggttaatacatgtattttttatgtcagaaaagtttatgaaacttaaaaaaaaagtggcggcagcggggacgctttaaaaaaaacctgcctcctgcagcctctgctcacggtgcaccccctcaccccctggtctctcaaacaggagccagctctgtgttctgtagccccacccaccaggcactcccctactccctccctgccatggggccttggcgcctgctggtcctcctgcccagaatgctcttccctaccctcttcgtccagatttcgtctctccttcaaatctcagagcaaatattattgtcctagagaactcctgccagagccaagctgagcccactgttacattttctcacagttcccatgttttccctataaagccatgatcctggcttttgcagaaacaattcctctatgtatctatccgtgtttatcttgtgtgattattttattaatgttcgtctctcctaccatgctcatagcccactgtggtttgtgagtcttgtctgttctccatatcatagtaatattaatattccaatatgaatattcatatttccacattagctttgtgtctggcccaagtgctcaataaatgttcactaaatgaatcgatctaaatgaccattgcaaccatgagaggaatattgtgcccagcctgagattttaaaggaaggacctagagtggctccagtgcttgccagatagacagggacatcatcactctcttgttgttcacaaaagcctaggattgagcaccatgcaccattctggcagcactacagatgaggagactgagggtcagagtggtcaagtaaattgcccggtgtgcttagattcaggctcaggctggccttacccccaagcctgagctatcactcgggggtatgtttcttggagtgaaggtgcaagaaaccaggtgctaagattaggccacagggaccaaattcacacgattttatgtccgggttacagcctggatgtgggatcccagatctccctggacgayaggaagtgtgcctcctaagcgtaggttctcctgctcactcacaccgtgggtgggctcaggtaagaagctctgggcagagcacggtgaccccagctctaggccatcctggctcggtggagtcrggcatgtgtgttccccactgtgaatctcagctcttattgagaaaatgggcacagaaatgtcagcttgctcagctcatagtcttattccaaaatcaagtgaaaggaaagcactttgaaagatgtgacgctgtgtcgtgctgtggaggcatggaaagtccctgtcctgggggtgcgtgctgtgggtgtgggagtctgaggacttggattctctactctccttcccggtgaggatggccatgtcattttgcttctctcctgtatgactagtgcagtccccttggctgtttattgctagagaggaacttagttatggtccccaggactgccaccagcccggggttctgcttccaggcaataagctttattagccctacgctctcaattatccttttttcctcctccatgggaagaactaagaaatggcttgggaagcccccttgaggtctggtgacagctgtgactttatttggggattactctggggcatgtatagattcatcaaagctcccttcttattaaaaccaaggaaaagatccctctcactgccagggacctccagccggcccttcccctcacagctccccactcttcctcactgctgctgctcccttgtcctatttgacaattaaaaccgcatctttagcaccttgatgcccgcaggcccggctctcctgaggggtgggctcttgtatccttgctaatcccccagttctcaaatactaccagcaactgtcatcttccacctacaggacagtaaagtctatctgagaatggaaatccctcacccctcagcctccttcaccacccaagggagaagcactgtgcagggaggcggggaggggtggggagcatcggggaggggtggggaggagcagcatccsggagaggtggggagcatcggggaggggtggggaggggtggggagaagtggggagcatcggggaggggtggggaggggtgggaagcatcggggaggggtgaagaggagcggggaggggtggggaggggcaaagaggatggggaggagcggatgcacctggcctcccaaatccagattgtggtgccagctctggaaacacagcaagtcactcctgaattacccaaaccgcaagtggaaaatccactgcagctgagtatcatgtactttaggatgtctgaactttaggatttccctgggatcattatcattctaatcattctgggacctgagagaagtaactgagtcgggggccagcaaggcacagacactgatgaagttcagcctagcagtggccagtttttttttcttgatacagagtctttctctgtcgcccaggctggagtgcagtggcgagatctcagctcgctacaacctccgccgcccaggttcaagcaattcttctgcctcagactcccaagtagctgggattacagacatgtgccaccacgcccagctaatttttgtatttttagtggagacggggtttcaccatgttggccaggctggtcttgacttcctgacctcaggtgatccacctgcctcggcctcccaaagtgctgggattacagacgtgagccaccgcacctggcctgggccttcctattttgagggaatcatcccagaatgagaagaactctstgtagctgggatgtgagaagcatgtgcagagcttgagtgggtcagtacatgctaggccgatcccactgtgagcatttcacctctgctgggggacatgggcgcagggggtgtttgtgttcaggggggccacctctttctgatgccactttcctgggcttgtccaacccctgcttggctggaaggggactcacccacctgcacatcgagaacctcaccaacctcagaggaaagattagaacagggcttcaccacagttttgctttctgtgtgtcccacccctgggaaatgctgcaaggacgtcagcctgccaggtcaccctgcagccaactgcatcctttcccagccctggccgcagcagctgctgggatccctttgtcattagtgcaggagcaaaatgggaatgggggagccagcactacaagcctccaagcagtgttcaggtcgtgtgtttcctgggcaattggggggcgtgagttatgcagggcgctttcctctctcccacccacccaagtccagtagctttgctgcctgcgtgctttccccaaccatggacgggcctctcctaccatggcctcaatgctgggccgtctccccagctgagatgccccctccttaaccgagtctgcctgcatcagtgctcacctggtttagggctgcgcttagagctagcgtgtcctggtagggagtggcctaggctccagttccttttcttcaccagcactgtgggccaaggcgcatggcctcccacgcaccacagcagagctgccaggtgagattgatcttctgtggttgagatgatcactcttggctgtagcccactcatgccgtgagtgacagacaggtgcttagggcaccagagtcttctctaataaggtggcagctggccgcggttgttgatttaccggccaggatcttcgcctcaagaaccacagtgcgctcttctgtaatyagtgctttccttctcacatctcctgacacgaggatgagcagagcaggctcgatgacacagctgctcaactgtaatcctgtatgataattttgcaaattattatttttaatatcagctttttccttaggcaataaaagaaaaagttaaattgctcacaaactaataaaggtttatcttctggagcatcaaattctgtttactcatgaaacacacacctcctctatgcacccatcgagaggaaaattagcatttattttccctgataaacaaaaacagtggaagatttgttggcatcttttggtgttaagcccttccttacatttaaaatgacatagaggaatgcaagaactttggaagaggtctgccctgactctggatttaattttaactttggaaagcaacctgttgtgtgcagtaggatgttatgtggtgtctgcagtgcctagacgctaacracatgcatggaaccaagctcccccttgggcccaggagccaagagattgaagaaagggaaatgctttcatgactctccacaagttcctccacgttcccaccggggggaagatgttgtgtaaccctcagtgatgagaaagtgagatttcccccagctagattcctcctcctttgattcattttggtggcaagagaagttgaagctttgacactctctttatttgcctcagtgctagaaggctttaattgcacttaaaaataattccagtccgattttcaaatgccttccggartgattcagcgtttttcttttccctgatttccaggtacggagatatgaggagacagattggctttgaaatcagagacatgtggtacaaccttggtgagtagcctggatgtgggggcatagtgaatatcttgcatccctggtgggtcatggcactggccgtgttcatcagtgttgggatgtcttaagatcttaatggcttctgttccttggacagcagttgctactctttgtagtaactgttttcaggaattaagagatagaagaccaaaggcaaggaaagaaaatctcacgggtggggcaaaaagaaaaatccacagagcaccctcttgtgttgtgtggacacgtggcttggagctcctccctccctggtgttgcctccctccctcagttgcctcagttccttctgcgtcaaataggaagctcatcctgctgtgacatttgccatcacttaccatattcagttttacagactctgccttctaaagggttaattcccctcctcaaaaccagatctacctggtggcagcctaacatgctcctgcactcaaagcagtgaagggtctgtgtgtgtatatgaaattaataggagtttatttgtaaattaagtaattttttccaactacttttatcatgaacagtaagaataaattctctattaaaattttaaccaatgtgacatgtaattcttatagataagccccttcaagaaatcaatgactgacaataacttggtatcttcccagcatctttacastaccctctaggaatctggcctcactcctcgttgagatgaagctctctctggytcctgccstcagccctcgggcttgctttgtgccgaggtgtcctaggccatggggtgctggtggccttgcctcagtcctgagcaaagcatcagttgcttttctgccccaggatctccaggcctctgcttccttccttcaaatggacacgagaagcctgcattggcctgttgcaagaaaccctccactctcccctctacctcagagaatcttttcctactagaaggaggcaggggtctgtccgcatcactctgttagcctcgtagcattagggtttcacttgttgcaccagggttgggacaacttagctgcaccccagcctgcttacttcccaagcagctgtgactccctgcagtggctggagagcatggcaagaaagaagcagaacccagcgagccacgcttcacttctagctcactgtttgcttttgcatcttccttgccattctttggtttgacatgaggcccagttaggttctcaggaatggaaagccacagcagatgctcctgggtggggatgaagagcgggtcagagtggccctgtctgcctgtgccctcccagtacaaagagaacctgcaccattgcatcctttctgcgtgtcagtcctggagtcagtggaggactcctcgaggaagctctgtgctaggtctctgcacatgattttgctgcagtagctcctatgtccagaatctgagtactgggtctcagctgtcaaagggcctgctgatctctgcaacatgatacctaccaggcaccatcctgtccttggccttcctgccatcccagggaggaaggtaggggctctaggctcagagtcaagagagatgataagtcccaccttgaagttttcatcctctcccactcctgcctccccgtgaggcctgattcacatggctcagtctttctgggccgttagataaagtggttggactgaatttttcaagagccttccaattccaaaactcaataattctatgacatatatatacgatgatctcagtaataacgtgctaaggcttttagaacagggaggaggaccatccgtgattcattccaattgatctctctgtgttctttgttaaaatcctgctctgacagatgcatctgtcatttgctctgttaggccagacggcaggccccacaccaggcagggacccagtgtggtcccatgagagagagagagaggcaggagacgggggagggctttcacagcaatggcatggaggggggctgttctctgttggaactcagtgagtccaggacttttataggcaccarcgttcatgaaggaggtgatatgagctccacctgccacagttgggctctcagggcagaccccagacctcttctctggacacaggctctctctgaggccatcttttaccctggcccctcctaaaagagtgagtccattttcttctgtgttgttccatttcaactctaaagtatagacagggaattgcctatttcccccaagaggacacttgcacatatactttcaaatgaaggttctcattctggaatggctcggtaacatttcacatcatttatgataattagagacaccaccctagcggagggtctgatgggtcattacatactgaaatgcttccttctccccgtacacaactgcagccaccatttgactcaccctggcccctgagcacccccaggatcctccactgctctccatgtgccaaggtcattgcctagcaccaagggagcctctaaaactcagctcgagccacagctggccagaggtcaccctgactgatgggtgctcctgcctttctagttttctgatttgggattgtttttgtttttgtttgcaagtatagttaatgtcacctctgtagtccctgagattgatcaccactgaaagtggctccatttcaatttgtgctacgtgccatgataacaatgaaggaaggaaaggcgggcccagaaagggtgagtttctccgcgtgccctctccaagtgcttgggcaggcctggccttctgaggatacacttgggtctgacacagagcacttggttctcttgacgttatctgtcatgctccagataggccaagtcaagcgacaggagacttttgatttggaaaaggttgcagtgaagtgagcaagctccccccttccctcctatcagtggctgatttgaatatggtgattaatgcatgaggtgtgtgttttgcagctttttagccaggaacactgactgtggcctgagaagcggccaagaggtcaaaagtaaaccaaagccaattagggtcagggacttggaaacaacaagaagtaacagtcagccaccagacttgggttccttgctggtaaaataagttatctttcaaagtgagggaggtgatcttaaaagcacctgcagcccacaggatcctccccaagcagcccctcaggatggctaaggatagcaccacggggtggcctccttcctgccatggtgccaggtgcctgagtgtctttgccaaggctgtcacactccaaatttatgacagcacatctcagtttcccaggatgtatacaacctactttctacatagtttttttttwwttattttaattttactttttgtaaatgggtgcaggtttgggaacatattggcaggatgatagcaccgactctgccaagaaaatagaaatggaaatcagatctatttatctgcttacaattaataaactgtcacttgagcagaccttcagctgaatgctccatgagtctcctccttcagtctttccaatagtatgcatggcccatagagaggagcatctcagctcttgcctcctccttgcccagcctcagagcaaggatctggggtctgttttgctcaatttaatgcaagggcaaacatggcactgccccatgggacagagtgatgtgtttctttccctcccaaacctgtcatattttgagtctgaaaggggaaatcaaaagcaggctctctctcaaaagaaaaaaggggggaaaatgtgcttatttacccagctcctgagttatttatcaaagcgcactctgtgcagcagcctgccggagcacctgatctccttgcctgtgccgcctcaatttacattttgtttattacatccagcacactggagcgagcactagaccccagccagccagaacgaatgtgcttggagcaagatctttatccaccgcgttgggtttgggatatttttcatgcagggattcccttcatgggtgttttttggcgactgggcaaattgtgtgcttttcattaaaacccgtatacattgtggcctaatgggtktggccaggtggtggaagcttttgctctgcctgctcttgtgtatacagagatttttctgggataagtctatgtttaatgtcccagatttttgaacaccagtgattgcaaagagataatttaaacacccacagggaggcttctgactagggaggccttggcttcgtgagaaaacaagatgttgttcccaggggaaagagctccacgttctgtaactaaaatagactctagatgggctatgagaccggcaaggactggaagtaaaatattctcctcgtcaccttcctttggctcaaaagtgtgtcctctttttctttaagtctacactgcaggagtcaccttggtcctcattggttccaaacctgagttcatcattaaatttgagcaagatatgctccaggggaaatctataatgcaaatgtcaaaaaaaaaaaaggtggctaccagagaacattccccacccactcctgctcaccttggggaccactggtttacgaagagtcagtgcccagggctgtcactatccatagaacccagtaccagctccaggccagtgtgtcttctgtactaataaggagggtgataataaaaggttaagctactgtcrttttggtagcttctttttccaatccctgcttctacaaccacttgtgactgctttctatgtttttcccagcttggaacaataaaacctgttggtgacagacagaactttatgacgctgaaattgtggttgatgaacaactcgctgtcaccatcatctgttttctgaaacattggctctgacattttttaggcataatacaaggaaagtgtcacctgagagatggaatataatagcattttcaagagaatgctttgcagcagttacaggcctttcagaaacattaagcatttgggaaagtggtgagaatcacacaatgatagccttagtcaaaatattaattatttagtaaaagttgaaaataagatgttaattacattttgtgtgtatgtccacccaataaaaagtaattcagtctaattatgaggattacgtattctcttaagtatcgttatagtagccacatttctttaatgattctctttacagaaatgtatattcactgagttgcaaagaaaactaaagaatttrgtttcctgattgtgtagaaatattaataagattggttaattcgggatacattgctggtgttaaaatactgcacatattttattcaaacatttaatttctcrggcattcttctgttatrtgttggaaatgaaatggttttagttgcagtggggtgaaatgaaaacaaaatcaagatttctgaaagacaagagggtcagcttttaaaagatcacctttttgataggacctgcctctgagtttcattatgtcaccttaactaaggttcgcagccccatttttagaaaggagtcttccaggagcttcattccagaggtgcagtgtccaggcagtgaaagaagcttggcagttgctgtggtttcctccctctcccatctctctgaacttgcctggttcacttcaagctctttaggagctcaccctgatcctcaggagtaccgcagccacgcacccacaggatatggggtccccggctggggtgagcacaatggcggccaacccacaactagcaggagggggaggggctggccaccacatcaggcccagctgccagctgctctgcccagtcgccagatttcctgatggtgatcctgcgctagcatctttctaagtcagcgacagagacccaggaaggtatgataccaagatttccaacaaaaaccattgaaattaaaaacataaattgagtgcttgtgagaagccagtctctaccttctgggggcttatttagcattgtgatgtctcaacagtgagggataaaacgatggaaaatgacagatcactgacctctctgttcattttgcaattaggggggacaaataagggagtggacagctcaaacgatttctctttcagagagtcgggtagggtccgagtgccatgcaaagatcctgagacaagcaaacagggaaggaatttgtaaaatgagggtcacagctaagccttcataatctcagacccaggttcaaatcctgcttctccacttctctgaacagctcacagaacagctttgggtacagcccactttcctcgtctgtttaacaggttaagaaggtaaccatctcgtaaggttaccgtgaaaattcagtgagatgatgctttatcttgagcttgtcatgtaaattgtaaatgctaactaatatgatcatattcaktattattcacatttgaaaaacttttgagaaacatttttctgagttctttaaaaatcatatctggaacaagataggtgaaatgagattaataaagtagttctttttttttttttttttttttttttgagacagagtcttgctctgtcgcccaggctggagtgcactggcgtgatcttggctcactgcgacctcttcctcccaggttcacgccattctcctgcctcagcctcccaggtagctgggactacaggcgcccgctaccacgcccagctgatttttttgtatttttagtagagacggtgtctcaccgtgttagccrggatggtctcgatctcctgacctcgtgatctgcccgccttggcctcccaaagtgctgggattacaggcgtgagccaccacacccggcctaaagtagttatttaaataagcattttcctatcaaacaatagctcraaaaggtagaatcactgctgtttttagggtttcagcctcagattccggcgccttgatttactttgattggagtcgtttggcatgttgcagaaatcaccctgcattatttacagaggtgtcagatrgcaaactcatcttcataagatgtgggarataaagaggacycaagagactatctgctctctctcatttgtcggctcctgttcctgtcgctgtgcacagagttagaggctgagacccccgactcgcagcccctgctctattcagaattgggaattagctgcatgtgttctgaatctgtgtgatggaactggctacttataaaacagtgttcatcttctctgacagagaagtcatgattacaggcttataccrcgyggatctttgaagagcttcacttataacatgtggaatacaggccacttcttatactaatggctgggaaagttcaaaatcatcatctgcagacgcgaaatggatgcacattttcgggatcctgctgctcaaagtcacagtgatctgtgttgtgttgttttatccatttaagcccattttagaattctatttttctttatttctgaatattgtayctcttttttccaaggtcaacacaagataaagttcattccagaaatggtgggcccaatattagaaatgacattaattcccgagacggagctgcgcaaagccaccatccccatcttctttgatatgatgcagtgtgaattccattcracccgaagcttccaaatggtaaggacgtagatgtgcagcgagtggccgggggacatgagggaggcaaacctgaaaaccttcaaagaaacctgtagacagttctagagttaaaggtgccaacgtggaaaacacattttcctacagcttgagagagaaaaagcctatgattttccttattgaagaagcttatcatcccttgcactcaatttttgggaggattattctcaattttyagctcttacttacttcttttaatctgggtttacttacacattgcaccctggataaaagtctcttgctcccacttcttggtacgtgctcttgtagagcgtttaatcaaatgttatgtgttacattctctcagaccggctgcttattgcagaattgtggtattttgaaagctaaagtctttgcttttattctcttaagtgtgtgtcttgttcttttgcctgtgcaatggaactgatgaaaattctctaagaaagtgtatataaagtgctcaaaacatactgtgacaaacagcatgagggacaaactctgctgcataacttatgctcaagaagtaacaaaatctccttctggatcccaagaaaataagtatactgtttatgtattcttgggttggcacccacacccacacatacacacacacacacacatgtacatccccacacacacacatacacatccccacacacacacacatgtacatctccacacacacatatacacatgcacatccccccacacacatacacatgtgcatccccacatacacatacacatacacatccccccccacacacacacgcacatccccacacacacacacacatgcacctccccccacacacacacacgtacatccccacatatacacatatgtgcacacatacacacacatgcacatgctatgactttctccttagtgtactaatggtttggccatgatgctttgcaggagacctgggagaagcccaagtactagggagtcctctgaattgaaagataccttttaaaaatcattatactggaccggatgtggttgcccacgcctgtaatcctagcactttgagaggccaaggcaggcagatcacttgagctcaggagttcgagaccagcctgggaaacatggtgagactccgtctctacaaaaaatacaaaaattagtgaggcatggtggtgcacacctgtggtcagggaagtcaaggctgcagtgagctgtgatcacgccactgcactcccgcctaggtgacagagccagaccctgtctctaaataaataaataaataaatattaaaaattattatagcaattcaagtaagtcaacatactaagcattttacatagattttagaggaatttggagaaaaattcctataatgaaaggaaatcaaaacttcatcaatcaagatagcttaatgttggtgagatctaatattaaagggtatattatccttacccacctctacagtttatcatttaagggagctttgagtagtttatagattttcattggtcatcttcatcatatcacatgaaggcggtatccacgaagaatgattttgctgtttcctagaacagaaaagagagatacgaaaccaaaacagtctccacactgtgagttgagtttagatactgagggcagggagactgagattcacaggcttagccaggtattatctgggtcctcagcaaatcactcaacatcttttaagtctccaattcaagcttgtaacattggcatgaaatagaatctaccagaaaggcgtgttgtgagaatgaaataaaatcagacctgtacaatccctagcacggtgcctggcactataaaaggtggctgtggatgcttctcttctctcaaggccggaacctcccttggtctgggtgtttgtggagtgcagggggcagcctgcagggtgagcccccagtgtctgcaggaccatggggcccaacgctgcatacaaacctgggcatggccatttcgtcagggttgttccggaagccggggaggagcacacaggagatgaacagagtctgactgctggagccgtttcctttaacctctacacacccacagctgtgcttgaaaacccattgcagaggagcctaacacctggctcggagatcattatttgttttttgcactttgctccactaggcagttttttaattttttttttatttttttgagacggagtctcgctctgttgccaggcaggaatgcagtgacgcgatctcagctcactacagcctccacatcccgggttcaagtgattctcctgcctcagcctctgagtagctgggattacaggtgcgtgccaccacgcctggctaatttttgtatttttagtagagacggtgtttcaccacgttggccaggatgatcttgatctcttgacctcatgatccactcgcctcagcctcccaaagtgctgtgattacaggcgtgagccaccgtgcccagccctaggcagttttttataaggtgactggtgactgttattttcacattattccaaccgtggacagtagagagggctttagtttaacttccccagtgtaatgtcagttggactggaatgagtggtgttagtacctcctcccttcttccttcctccctccctccctttcttccttctttcctcccttccttctttcctcccgttctctctctttttttccatgatagcagaaggtctccctgtatttatttttaataatattaaagataattcatttttgaaagaacagctgtttttgtttctctggctcactgtcagtctgtgtatatacaaagtctttgtataaagactgtactaatacaacattgtaaatattatacctagattttttttattaatgttctttctgtttgataatatatcaaggagctttcccttaattacaacatagcaaccatgatattaatgatggcataaaattaactatcactttcttatccatcgcctataaatgggcatgtaagttgtttgcagattttcactgctgtgaataactgtgcagtgaacacattcatgcatatagcttgaatttattttgaaaattttcccagtatacattcttataaatgtaattacggatttcaaatatttttgtaacttttgaaattattgccaaatggtttgatgttaatacgataagatttgccccatctccattgctgctggcactatatcatggccccagtttcactgccaactcattggaactacaaattataatttaaatgctttttcctaggcagaaaattcatttgactttttgaattttatataaatctagcccaaagaaggactttgtgaaaaattgctattaaagaatcaggttaagggggaaagtgtatttatatagataaatgtcactggcacagaaaactaaggtcaaaagtgtttaaaacatcattctatttgtcattttttaatcagtctttgggtcaaaataaggtcaagggcagttagaataaagaagaatgagagtttggtttctgaattgttccccttttccctcacattcttttgtctcatggctgccttgtggtagtttaaaaaatcttacaacaatcttctgaggaagtgcttcattttctccagtttgcaggggccccaggtttgctaggaaatggtccgaagttaacgagagccacagaatttgtgccaccattttaaacaccgccttcccattggggcttcaacattgacccagcgtcaggagacatctttccagaaaaccaaattgtttttgagtaatatcatgaagtaattggcacatttagttccatctcataaacaacaaactatttcactagcatgaaacatgccgtgcttggatgtatgtaaatccaagcataagcctgaagacacagattcacccacaagaaggacccactgtcaggctgagcgtggtcagctacctgaactgttggttcagagtcacctgtttctctgtgttgtcatctgcttgaacctctgcagacgagggatagcgtacattaaagatctttaaaatgagggcagaaaaactaacccttgttttaaaaaaatccctcttgtatgttaatctgcttctgtaattgggaaaagatcagttttcttctgtttgatgtgcccacctcagcttcccagctggaatctcccaagcctgcagcatcatccccttttctgccagtctccttgtcactgggttttccggctgcgggtcatgctggactggcctttgcttgctcccctggcctccgtggcagtcggttgtgaagcttcatcagtcctccctctgtctcatctgcagcctccgtcctctgcgcaatcaccattgcactagtccaggattattcctgggccacagtatttgtctcttgacttgctctatctatgttttctaagtcctttctgactccagttccacctgtccctctcagctggtcttcctaaagcacaagggatggcccctattgtcggtgatgtgggcgaatgtgtagagtggacatgtgtgtggcacattggtgcagggttggccccacctgcttctccatccacgagcttctgggatggggatggtcggctgctgcctaactcctctgccataagcccagttacctcaccttattagtcacgtcagcaggggcttaagttttttttatagcttttatagcagatgtgcaaaccctactggagtagggggaagatattagggggatttgtttttacaacactttagtgttttgaacccgtgatagagcttatgttttaaaggttgctrtgtcttttggagtagagctgtcaatatgctactgtttatggaatatgaaataatatatatgtccaggtgtattttactcttacaattggagtagagaggagacctgctggattcagaagaaaaacctgctattttactcaggattaaactgcaccaaaccattactggaattttaaaagcatgtgttacaaattggcttttctaacgttgcccggagtttctgctcttgtgctcgtgctcttcagccgcagtggcgggcatttcattagaacrttctttcccttacacctccccaagagcctactcctttcctgtctccacttgtgcaagaaagagcacaaatgttccttcggaataggctcagccttgcccttatcctgcttctccagggtccatgtgttgaatgggctctcttggtggcgggatggggtggcatggagttatcctttcatgggccatgtcctccttgtggcctgggactctctgtccagygctgcagtgagtgccttaggtcagcttgacagcactcgctctggggaggtggcgatgaagctccacaaaaggctccaggctgaaggtccctgatgctagtggaagcctgctgtgaagtgtcgtgttctgcaggagctgggccagacagaagcctgtgagatgggaggccccagatgtgcacagcggccttgaattctttttagaagtccctcctaccttcaaagtcatatgcttcactgtgggctgggtccatagccatagagctccggtccgttgacaggaaggcgttcccagcgactggacgctgcatgacgctcttgcaatctcacacctctctgccatcccatccctgtttgtgtacggccaggaggctgctgcctgtggggtttcttttcctcctagtgcttgcagtgtggatactccaagccaggggaggtggggatacatgtgggaagccccagtggatgcccactgcagccatgcccctggggtggcccccagccctgtggccactgtcagccaccccctccatcactgggcactcttgtgccacttccctgccctgtccatactcaaggccactgtggacatctggggcctcctatctcataggcatctgtctggccaagctcctgccagaacatggcccttcacaggggaagttccattagcatcagagaccttccgtctggaggccttggcagagcttcatcaccacctccccagagccagctctgtcaagctgacctaaggcactcactgcagctcctcaacaaaaacccatttcttatttcttctgcctcttttgtctstgggtgctccagctgtctgtggtcatcctggctcttccagcactttctatgaatcttttatgatccggatgccccagccattctcctaaatcatcctcccctgctgcttcttcctgtcctggtgcctaagggcacattctctgccccctttccttacagctggccaactcctcgagrcaccaycacagctgcgttcatcccaccccctcgccctgtgcccaccccaatccagagagtagcatgcttacccctaaactcaggactctaggaatctccatttgtttgaaaggagaggtcctacttgggaagatttcaggactgataagctggcaggggaaatgtggagaggcattggggtcttcgcgccccttatcccatccacctggatgagcctgcccttggtcacaggagatgagccctctcctggccttaagctgactctccctgcctcaccaagaaccctgccctcccgtggaccgcactccaagtctcaccctcatactggattttgcttcataataaaaagcatacttttaaattccctcctggcatctttttaaagaattccatttgttacgcctttggaaaatacagaactaacagctgagaattgcagcaaatgaccatatgggccatagaccattaataaaaatggaatggaaaaagctgcccagcaaaaataatattttcaatcatggagctattttctgtcatctttgtgaggctcagtaaaatgctgcacaacttccagaaattcccatttagttgtaacagtattagaacatgaataatctttgtgtcatcagtgttgccgagctcctgtttgaataatctcttcacactgcccatgccagtaaccggaagccagtaattgaatagccgggtgaatgtcagcggctctgccacttggtggaaaggccaatgtattttccactgtaatatgaatgtgaatgagtttggtagcaattctatcttgtgtattctttaattcattaggattttatttgttggtttgtttatttttgctttcaatgtcaaaataattcttgcctaaagaggaaatatggcacaagaggcttctgtttcattgaatccagacccaaagatggtctgagaggccatggaaaccaagatccttgactccaggagctgcgattatattgaatttcattcttaaaagccctccagcaaagagattcttccataatcccctttaaccagattaaacaggactaattttgaggccatgttcccagagtcctctggaattgcatgcagccctaaagtcactctttaatctgtgtcatgtagacataaggagccgctgcacctgtctcaggcatcagcaaggtgtcatggcctgcgatgcagccatgcatccccagccaggcagctccaagtgagtggctctgggtcctccaggctcatgagtgtttcacaggagctccaaggtcagcaagccccttgcttgacggacgtaggaggatgtggaggtttttgaatgtgggatgaagtgccaccgattaattagtgtgtaattaagtttccagagcagttaggcaagaggaatgctctatacataaagatatgaatgtgtctgagcacaggkactcaaggctgagtgatggatcgggagggaccagtcacttgtaggatgtcagcatgggcgcctagagccccaagggttgtgcggtgtcacacttctctctgctgaaccttgcctgtttcatcttcttaaccatgttttccacccagatacagtccagcaactttctcccacccacctccccctgcacatgctcagggggtaaggtgtggttgcgcagtttcatcagattggccccgacccagggagagaaggcagagagagtctgattccttggtgccctctgcctgcagtatcttctgagcatttcttctttaaatacaggagaaactagagcactctgggcaaagagcagcattgtactaaggtttatttttaaagggtcaaataagcccttctgctaatgtacttagcagatcatgtccatagatttcagatctcacccggctcttgataacctcggagccctccatcaaggcggtgagtggtctgtgcaaacctttccaccctggcccagcctcctgctgcgctcccacagaaccctagagctcttctggtatataaagcatggtcctggatgtctggcaagtgcaggctgattttatacattacagatgtataaaattatagatgcattagagtaagaatagtaaatctcacccaaaacaaaaattatgcgttccaaaccaaatataattggcttttggattagctactactgggatccttctctccatgatctttcarataggtgccaatagcctatggttagctgtggcagtgagtggtaaaagcagtgtttcctttttaagttaattgaattaacaagacgtcaatatcgcttcgagcacagccccctgactccgtcacgtcaatttaacagcaactttccgaaaggccttctattcataagtgttctcttgtttcatgttctcagagggctgctggtatcagacactgagagactctctgttcagtattttcagttggacaccctgtgaatatttttggagcaatattagtgattcagaaaagagaagaaaatataatggttttgcttattacgtgagtgagcctctgccaccttttgagcaacacagtaaacccttgctaattttatcccagccatagagaaccttgttgcaaatcaccagacaatgtgcatttatgaggaagataataagcatgattttgataaaaccagctctgctctatcagcaaatgtactatctccaatttagtgggacaggatcatttaattctgattatagtaacagttcatagmacactagcgaatcaattcgagtgtattctataaaaatgaacgaggatcctggaattagaggctagytgtggatctctggtactgaatccttgctaataaacagatcagggtggccaggtgtttgtgtaaattacttagtttggactagggttagtaaaattagaatcagctgtgttgtgatttacttaccactcatycacctttgttggaaatcattaagttcatcagtcagaatttgatcagcagcatacctaggtagctgtagcttcctcattgcctgtgtttgtgacagctagatttacatggaagcagagaaaacatgccgttttcataacctacactctgtgttcagatccctttggcttgaccattgatgggcattttaaatgcctgtatgtttgcccatgtcaggagaaggcacatttctctgcattctctgtacctttcttgttgtctgtactcattaaacatacatgaaattgaatcatgttttgattaaatttaatttaattttgtgtctctattatttgtcctgaagcatcagccctcatcaaacatttaatctttgaagtctgtctggatcatggcaccatctgggagatggcactgccttgaaatgccaacttttgggctactaccaagcgatctcccttgtatgtgattccaaaaagaactaccttttgcagaattcttttctgtaaagggcaggatagcagtggttagtatcaaaaggttgttattttacagtaaaaatcgttaatgtgagatttcaggagaaaaaaaatctaaagcaattcattcctccttcttcaatagaaccatctgtctgtgctgctaaaatccttgaacttcttaggccagacagaatcaaaaagaagtgtttatttgggggaggagaccatggagaagatcaagaagaaaattggagagattcactaaggtccgggttctggggatgttgctgagtccttgatgtcaggcaagaatcagtacttctctccagccctgaaagcctttgtttcatctgtagctgtggctttgggcagtgtgtactgatcgaggacaggcagggcgtctgtgtccatttggaggcccctccttgggtttcaccgttccttgctaattgcttctcaggggtccacagtcagctgctcctgcaggggcatccccaagtctctggtgcccacagtgtctgtcacaggcactctggatgagcagttttcacgactgggcttggcctggccaagaatgcaggttgtgatttatcaaccctctagaccgctcctttgctgacatattaagccctctccagctttatccagtctaagcactttaatccaatctaagttggtctaagaccaactgtattcagtagtttatgtgcacacagcacattcattccattagagcatcaaaggcactgtttgaggttttggggctggctagagcaatgaccaaagaaaaattcttcctctcactcagcttaaattccactgggatcctaataacagcaggcggcttgagaattgttgcctgagaaagtaggtgattgaacatggctttagagagatcctggagacccttgcatacatgcccatggcgtacttgctttctgaaccctggattcagctttcttcaattcttcctttgtccatcttccttcagtttagagtgtgcatgtctcatctttatgggaatgaacaatctcacagcccctccttgctactggcacaagttgatggtaacctcagggccccctgcagcatggctagtcaccaggccggagtcccagtactcagatggctatgaactctgccagagatggggaactgggcagtgaggatggggaaaacatgtccattgttatcgaggtttttttcagcctgatcagacacttgaagacattttagagatttccaccccccagaatttagagtttttctaaaagcatggatctgagacataattagctggtactggcgacccttctgcaccctgattcccaggaaatttaatcagaagctttggggatggaggataggctggagatggaccttcttgaggtgcctgctggtctgtctttagggacattgctcctcttgctctttagaacattttttcagccagagtgaggtatttcactaggatctatcaaggaatggcagctaagtggcccctaggatgttttcagattgccgagaactcttcactggcaggggaaacaccatctgttcatttcaggaaccaacaagctattttagatgttacgtgtttgtagagatgaagtttgagactttttttcatgctgcgctttgatttttttttccccctatggtttccttgtctttcttcccctggttcttgctcctgctatcaggacgtgcaggttcaggctccattaaccagaaaaggaaatgagaggtccccctatggcaagggatcatcagaaacctccaggggttctgtgttggcaactcttaaatgaggcttcaaaggcagagggtagccatctatgatgatctctcttgccgatttatgttctattgacactcaagtcataaaatgaaatactygccatgctgattatttaygcttcctctgtttaattatagtttgaaaatgagatcatcaccaagctggatcatgaagtcgaaggaggcagaggagacgaacagtacaaagtgttatttgataaaatgtaagtgttgattagcagtgggatttatgtctgagagatacagagacagagagaccgtaattagactacaatgaactttgtaacccagaaataattaaaatgtgttaataatggaaaatagttaaaattgcacctctgttgmgtttctttttctgagtgtgattaacaaggtgtgtataattatttttcagccttctrgaacactgcaggaagcacaaatacctcgccaaaacaggagaaacttttgtaaaactcgttgtgcgcttaatggaaaggcttttggattatagaaccatcatgcacgacgagaacaaagaaaaccgcatgagctgcaccgtcaatgtgctggtgagtgaaagcttaatcacgttttttcagttttcacagcacaccagaaactgaagcggggattgccccagcccttatctatgacagtcagccacgaagctttccaccgcagaacaatctccttcgcttgtttcctcatctgctgcagggaaggaatcatgaagtcgtccactctgaataagtctgtaaaattgtcccatctctggacgttttaatgtcgctctccttgtcgttgtgaatgatgactcaccgtatcttgcagccagggtagtgcctcatggattacggccttaaggctttgtgattaggagaccataaacgcgtgctatgtagtacataggctgaatggtggcctcaaaggtagagcaataccccagtccttagaacctgtgaatgagaccttatttggaaacaagaggccctgcaaatataattaaaaagaatctcagatgggattatcctggattacctgcaaggggaggggagaggtactaactccaatgacaggtgtcctcataagagacaaaagagaagacacagaaacaggctagaccttgtgaagatggaggcagagattggagggacccagtctcaagccaaggaatgcctggagccaccagaagcctgcggaggccaggaaggatcccccsctagagctttctaggggaacgttgtcctactcacaccttgatttcagattctggcctctggaactgtgagaagaaacatatctgttgttttaggtttatggtaatttgttacagcagccacaggaaaccagatctgggcaccatggagaacagacgcctgggcgaccttggctgctgccatctgtctgccttttgcattcctgctgttgccctgatacagctgggttctgtggacacccccttcctgatgtcattgtggtccctaatccaggaaatccattagtaccaatgagcttttgggaagctttaccacaagctcagatcccggccagcctcatggctctcagcagcgttgtgattcccacagcctggctccagagctctctgcttctccctttgctgcttctcttataaagaaacacaagggctgactcgtggccatagtagggctttcctcaagtttccttgcctgtcccatggcaagaatgcaagaaaacactactcctgctttgctctacttacctcccttctctgcccagccactggcctcaggatttcagagtcgccaacaacatgtggatacatagtcctcactgccacatccaccccttgtgtggacttgtgggtgctttatgctcatggaaatggactttcatgccaggaggaacatgacacatcattcactctttaaaaagccagagttgtgtggattaaaaagataaacgaaaaggaatgctttcacttttcatcgactatggtatcagtgctggatctgtgctttgccatgaggaacttcacagctgaaagctcatgagcagtcttcgccccttcattgcatggctggacagcttgtttaggctaatgataaacatttctgtaacaagttttcttttccttaaaaatctaaatataggggaccagtttttggtccagcatgtaaagagcttgcaaattgtcactcctgtcctcacaacaagaaaaaagctgaacaaattgaaaacaatcaacaattattagttccgtcttcttagatctgtagataaacttctgaccccaaagtcaaagaaacaggaggatacagagaaccacagagtggaagcccaaacagaaaccaccactggagccagtactagattccttttacccagtccatcatattcactttcaacgcattagtacaatgcacgctaaagacaaaaacacagtgaaggggcagagcaggcattagaaccagactctgatacggcagaggttttgaaatcatcagacctgcaatttaaaacagctgtkatgaatatcctaagggctctaatgggaaaagtagataaaacataaaagaaggtgggtaaactacgtagaaactcacagaaatcatcaagaagaaattctggaaatctaaaacactgtaacagtgtgaagaatgcctctgatgrtctcatcaatcaactggacacagaatctgtggacttgaaaaatctgaatgtttgcagatgcatcatgtgtcttaggctactgtagaaattactggtctctgatgtctggccctgaggtctgggctgtggctgtgtttgtctttatattcacctggagactgaccaagtggtacagcagcaagctctgccccaggtcagttggtctgatcttacagacagaaaagaacctggcgcttacttcactgtcttcttgcattctgaccaacgttcaaagtaatttgttgtcatggtgccaatgtgattgacgtgaaataggaactattatttttctatgggaaagaaatggagaactttacaaaatccttccctactatggacataactttatagtgttccttctaatccttaaggggatctaagaggctgataagtgcccagaaggaagaattatcaataagtttattagtcttccaactytgatgattgagacttttatttgttttaagcaagatctcttatgctcaccaggacatgaaacagtggagaaatggtggtgtgctctgaatatgggctcttactacctgaatctagggtcaggaaacaaactcttgtaataaaacctacaatcacggtttctaatgtgaacctgtgttcctctttaattcagagccagactcagtgcccacgtacttttactgtggtcagcacttgctcagttttaactaagaaacacacccwgggttctcaaggttatctgacattattaactttcttcaaatgggaacgtcctgaatcatttgatgaaaaatcaaatgttctgctcttaaccatttcctggggatgataaaatggatcccaactgtcacagttttttcatttagaaaataaatctgtggaataaagggaaacaagaaaccagagttttaaagataggtagataggtgtcctaaccatagatactcactgcccagctcaatttcctggtcagtttttcccttttctcctggtacttttattacagaaacagagtgtaatagagatgggtatgtataaccatctctaaatgaatatagatgtatacatattggagatgtataaaatatactctgttagtcactaagaagaaatgaagcctaaagttaaaaaattaaattaataaaataaagaacatagaatttaccaatgctctgtaagtctgttgccaagtttcctttagaaccagcttcgtggtttcttacaaaacacagttagtggaacattgtaagttgtgtaggctccttcatgtcctattttcttgcccttaaaaaaacaaaaataggtccgggtgtggtggctcacgcctgttgcactttgggaggccaaggagggaggatcacttgaggtcaggagtttgataccagcctggccaacatggtaaaaccccatctctactaaaaatacaaaaattagctgggcatggtgttgggtgcctgtaatcccaggtactcgggaggctgaggcaacagaatagcttgaactcgggaggcggaggttgcagtgagcctagatcacaccactgcactccagcctgggcaacagaggtagactctgtctcaaaaaaaaaaaaaaaaaagaagaaagaaaatgaaaaagtaagagacgcagcagtcactctgcttggccacctaagtccccaggacatctcctgcaaggatgtctgcatgtatgttggaacttggatgtatatttgtaattctttaactagaatttcactgacagctcataatcgagcatctttaattattggtcactaatgttgctgagtgtcacttagtgcttctgtgcagtcatccacacgtcccatctctgtgactggtaggcgcatcattactttgcacatgccagttacttctcttcatagccccttggcaaggctaattaaatgcagagtggggtccagtatttttaaaatcttggtatctgttttagtccaaaatggaaatataatgcagatgtctgcgttctaaaagatcaatgcctagcggtggattggagttggggggccggtcccaatgggkttcctctgggagctgagctgcaagcttggcacagatgtcagtcagcgctggtgtggggggacttgagagacaaggctgcccgcggagcccaggaggagtgggagcaccgcgtgaacctttacgtaagaaacacaaaggttttatatagaaattgggattggagatgagtgtacttcggttgtggagaggttttgaagtcctaggaagggaacaggactcagcacaggcagaaaatagaagacatttcgtatctccgagagaggaatgaaggtcgcatgatattcccgttgtgaaattgtaaagaaaaatgatcaaaaccttagaaaggattaaaaatatgagtacaaaaggggatggtgtgaaaccgtagcttgtaaatactggcaactttgagttggaaatgaagggcttatcctctgcctttgatgcagattctctttgttgcgacagtgagttgtcagctgaaaatatcctcattactgagccgtgtcatatgaactggaggacagtaaagtgtcagaggcaacagaacttgaaaatcttggtgcatttttctaaatgtgcccccgcttattttctagacttagttatcatttcttttcagagacatcaattgtagaagcaatgctgggttttgctcatgaaattaaagagcctatgccatttcttggataattgtatgtctctgtaatggtgatattcactagttacttcaggctccgattctagagggctaacatcatttttaggtgctaaatttcacattgaaagtgactctgatgtttccttaccttaggccttgtgaggtgacttctgtgcctctctggtggctcctgtgtgaaaaagattttaaagtgtttatggagatgttcaccttaagaaatataattttgatagaaatgttattgctcaaccagacgatattttccagtaaatatgtagaaataatccattggttttaatctactaattaagctttctccatcagtgtttatacacagggggctttttcagaggcagccctctttttttaactgtggtttggaaggtttgcctgtctggaacagtgctatctaccagaaagttctgggataatggaaatgtcttgtgtagactgtttgatacagtagactagccgcatgtggctgttaagcgctccaagtgtggcaagtgcagctggggaagtgaattatttattcaatgttagttaaatttactttaccttttaatatatgtggctactggctagtgtattgcataactcaggtctgtattatcatattgtctttgtagctcttgctgaggctgggcccagaaagctttaaatcatgttgatgatgcttatttgcttattcccaaatttgggatatttatttatgtattcatttattctgatgagattactatggctaagatatcatgtcttcatgtctttttgggcaataccttgttttaattgaagacaagtgactttcaagtgacagaagttgattttagtcatcacagtgttcagtgtagaaatgtaattgtgtttgactagcaaaaaaaaaagtgaagaactgtgtaagatggttttgcaatttatgtgaatttatggttctgatccaaagagctgggtccatttggctgtgtttgacacaagatgaagtatcttgaatttttattgtgcatgtgataccttttgtggaacagatttcttaaaacagtattatggtttaacttttcagaayttctacaaagaaattgaaagagaagaaatgtatataaggtatgtatgcatcacgcttgtctgcatgytaattataaataataatatatgttgtatgtttacgtatgctaagaaatgtgttatagccrcaaaggtttattttgtagaaaattgtgaaacgtataaggtagagtttggtggagctcccagatacattctcagctcttgcatagcttgtccasaccagtgcagagttcttggtggtcaccattagccaactcaaaagcaaaactacaaataattgtttcacagcgttttgtacctgtygaccaactcatgtggcccttttgcaaaaagataagcacataaattttaatgtttcacagtaagttatatgatccagtgagaaatccagttataactttaccagacataggggagttataatttttcagtctgctcttagttaactgacgccatagtcccgtgttttttatgtctttcttccatgaagaagagaaacattttgcattgcctgctggattttgcttccctactcgccttgctccctggagtgagggactgtgattgagcccttctstcttggttacttctaaagtctcgtgtcaaataattagcaagattaccactctggagactaggagaaggatgtaacctacacagcatgagtttttagtgatgtgtttattacactgagggtgattgtctaattttctatttctaagattgtttttacttctcctttttaagaacatactatgtgaatttaataactcagttacctttatttctttatggcaaagaaattctttcgatcacattgactgtaatcattggagctctttattctgatggatttgtatttttacggatttttttgtgcatttggactcagtagaaatgcagaaaatcacaatcaagtattgtgtgtctcattaaaaatgtttaagggaaaatgaaaaggaatgaaaaatttgaaggaaaattctacctttgtgtatcatctttatttttttcctgagtttttcttagtgctttctgtaccaaaagtttttaaggcattttgaattatgaacatygtaaaaaggaagtgtagccatgatttactgttgaacatagaatttagctcttgcaatcctcaacacaaattatttagtgacattttaagaacatacctctgttttattgtctcaggtatttgtacaagctctgtgacctgcacaaggagtgtgataactacaccgaagcggcttacaccttgcttctccatgcaaagcttcttaaggtaatgtcaattaccagtcaycttgatgattctattgttataaattctaacaatattcagaattgtatttttccatggcaaattttagtaggcctataacttaaggktttatgaaattgactaaataaatgcaaggatatgaacaaaaatatttaggaagtactttgattagagatttgtccctgctgaatgcagatttaattagatgtcatagcaggtgatcactgagcattataaactcccatcacttggctgtgagctgacagcaagttagagattctacaattccttgttcaggactacaggactccaggatggtggagaacaatatcaagaaggaattttcctggtagaacagctaagagataggatgagacatacccctaattgtcttagtaaagagttagggaccagatcatgacttttcactctatcagttcacgttgagacctcctgctagtgctctctgcctgattcttctaaggagtgttgctcctagcacaagtctggcatgacaactgtctactcttagtggttcttttattactcagatagcttcagacattgactttctttgtttacagtgacgtatggatggatggatggatggatggatggatggatggacaaattgctatacagcctctagttttatatttcacaacctcagtaagttattagatgatcttgctcatgacatccttataaaaatttgaaaaattatgaactggataaataagaacagttacaagaattagaatttagtttggtggcattccacaaagactgctcattcaaggagtcatgtttccaaatccaagccagcctcccaaaaaccaaaaatgtaatgaaagaaaaccagagaaaattacattaaatgggcattcagtagtgtcaattaggtaataggagttaaggaagacattgtgttatggagtaaaactctggtaagactctttccatctttggcccgatcctgaaatttctgatagtttctgtgacacaaatatacacaggctgccctagagacctgcgagtatggaaatttgcctctgcctggaaacagcagtgtctgttacaaataaaacacacaaagctcagctcagtctggagggacctcatcagttgtcctcctgaggctggctgtctgaggacccattttgccccgtgccacgtgggctctcccaaggagcataatttataaggatggaaatttcagttggtacatctgataccagctatcccactatgaattctgatggccttcatttattcaaaactcaaatttcagtagcaaggtgttttttgcaaatgtgaagctatttcttttaccccagggaaattaaaatggggttgacaaactgctcactcaacccttactccgtccctcatagaacgtaaacttttatatgcatgtgtgaatgtaaaacatatatatgtgcataaaggcatcatttgtttaatcattggatttattgagtacagatgggtttgtcacaaactgcatgatggtttgtttcacaactcaaatcgataggcccaattgcattgctgtttcccctgggcttctgaattttccagtttaatggggaatgctacataatctctctccatatcttttgccccgttacattttgcaattttttctaaatatgttttgatattactgtaaatgtgaattcatgctaatcacctcactaaagaacatgatttatgttgttgcgaaaattcttcagtatgacagatatattattgtttattaactgaaaatcctcaaatagaatcttcttttttggttaggcatatctttcgtcaaaaccaagagcaataaaaactttagtttttcgcctagcaatcaaattattacatctccatgtggaagtggaaggtagagaggatttttgcttccctagtccatgttttcatttgcaaaagtgatttaaaaatgcaaggaagtcatttggattctgaacttgcttgttcttaatttattttattgtggttacatttcagaatctagttttgcttttattctccatcctccaataaaagtagaccaattatgttgtacaaacttcaaagttaaagagtttgtccaattgtgatggagatatgcaagttcaattttaaggtgaaaaatcttgcagaccgcttaaaggcttctcactcttgcctgacctttctggaaaggcagagccatacagggcccgtgccctgtgcctgggagccctgatgtccagcgrgaggtgctccccagcccgtggtttcaggaaagtggggcgggacctttgctaagacagtaagcagctgacrgagccttgccccgttgcccggaccccagcttcccacttagtgcctttgcagcaccctccctggcctggctgaaaacagggtcaagctccctctcctagggccagcaataagcaagcccatgctcaccgtgtcctcccgtgagcctccaggctgcccagtgggagcacatgcctcctgcccgtaggtgcccatggagtctttttcacagtgttctttttcttgttctgtttttttttcttcttcttcctgtagaagggtcttgctctgttgtccaggctagagtgcagtagccyggtcctagctcacgcagtgttgttctgtgtyattattctctaatgtagaatcgcaccatcctgggrgtcaggcatcttccgcctcctctttgacctrgtttgtggcacacagcaggtcctcatcaaatagctgctgaattttattgaaccttatacttaatgccactgatgtgttgagcccaagttcaggagctgacacgttgtatctgttaagtggccttgccttccctctggcatgtctcctcgtgcatcttcagctcacacgccgactgcaccaatgcttccaggaatactggccaaaccctgactctgtgcccagcaccttgcctatggctgatggtgcaaagacacctccccatctttaaggagcttgacagcctttctagtccctttctgggtgacttgtgtgttccatgtaccatctttgctgttgattaaaatgccaacccacgcagcactgagaccagagccctggggtgccgctcttgggatggccctggatcacctggctcctgatttgtcccggratgttaggaggtgtcatttgcaagctgccagttccgtgctttgcagaacctgctgggtttttcttttgtctgaaccccactgcagctatgcctcccctgtgtcttttatgcctgtcggtatgtccggacagaggctctgccctggcagtccccagcctgttgacagcagccacacatgtctccagaacygcggcccacacgcgtgtccgatgcgaagctcacaccattctgaygtccctgggtgtktccgcctcgggtccgctcatgctatgcttctcccttagtggtcggaggatgtgtgtgtggcccacctcacccagcgggacgggtaccaggccaccacgcagggacagctgaaggagcagctctaccaggaaatcatccactacttcgacaaaggcaaggtaaaacacaaaaagcaattgtccttgttttcctytttccatgcacctacctgcagtgttgtaaacacgttttttagcgtgtgatttttgcagaaccagaaatttgttacaagttgtatattgaaatgttttatgcatgttccttcagcttgcacttaaaagtagaaatcttcttttaaaaaaaatcaatagccctktwatagatgctctaaaaaagcaccaagtatttttataacccttaccagagggaactaastctggaacactgattcggaggtgtttccgtgcccacagagctaatgtattcctttgacatcctgcatttttctgttggcacggaagaattaatcccatggtaggatggatattgctccatcctggtggcttctagtttaattggcttaaacaaaattatagattccacttgacttccactaaaaggaaacctgctgtcattttaatcagccagtattatatctgatcactgtagttcttctgattaagrtatgcagtaactatttaaaaaaaaaagctgtttcagtttcagaagttttttaaaacctgccaccgaagtgacattggaactccttctttggtttcatcaagattcctaactcatttcagaacctgttttatttttctttttttcctttgagaaaactgactagcacactttatgaaggtaccgacgttcacatcctagggctgctgtagcacaaactgggtggctttcaacaacgggaatgtattctcatagcttagtgctgggagctgcaagcctgatgtcacagtgttggcgtggccgccccctctgaaggctgcaggggaaaatctgccccgtgccttttcctttgcgtgtgttgctggtggtctctggcactggtcatctgtaaccacatcgctccaagcccttcctccgtcatcacaggccttctcctcatgcgagtttctgtctcagtctccttctccttaggaggtaccagcggttagacgagggcccactctcctccagcaggtcctcatcttcccttgattacatccaaataccctgtttccaaataaggtcagattcagaaatatcaggggttaggactttaaatatttctggggacacagtcctacccacaattgtactgatgcccgggagkgatgatggctgcccctttttgtggctgttgacgtaaaccaaaccccattgaaaacaatgactygacagagtccccgtggtcacgagcttgggattctgctcacatttggagtaagcgatgcggcatcctttatttgtccctgccattcttgacacagggagaaagtctgacgttttcagaatggcrtgtgggctcccaaaggctgsttggaaataaggattggaaatgttctgtgaattacacccagtcctgtagtttaggggtccccaaaccccaggtcctcagcctctggtacaggtcgtggcctgttaggaaccaggctgcacagcagcaggtgagcaacgggtgagcaagcaaagcttcatctgtgtttacagccgttccccatcgccygcattaccacctgagctccacctcctgccagatcagcagcaccattagattctcacaggagmatgatmcctattgtgaactgtgcgtgtgagggatctaggtgccrtactcctcatgagaayctaatgcctgatgatctgtcactgtctcccatcttcccctgatgggatcatctagttgcaagaaaacaagttcaggctcccactgattctacatgatggtgagttgtataattatttcgttatgtattacaatgtaataataatagaaataaagtacacgatcaatgtaatgcccgtgaatcatcctgaaaccatcccccaccccggtccatggaaaaattttcctccctgaaaccagtccctggtgccaaaaaggttggggaccgcygctgtagtggaacaggatatatttttgttctctggaatgagaagctttgaggattagggccaattactawaaytgtactaggttagccaggagaatcctgtttctcagcaaactggtaaagaaatggagcaaatgcagccatcccttcccggcagtggcttcttggctccagggtgagcagtgctacagaatgggcagggcagggcagggcaggaggcagggaccctggggtggccgggaggcccgagggccagaggtcacgggactgaaggaatgtgcgcatttgttgatggctgttgccgggctctctttgtggcagcacatcctctgaccagcgttggctcccgcgacctctccaccctcattccctcccttgccctctgcattccagccacactggcccttctgcgtcctgaaatgcaccagccctctctgccactgcccagcgggtttctgctgcactgccttgaggacgttgcttgagtcagttttccttttgctgcctgtaccattttgtcacttgaattagctttttctaagccaggctttctcaatctgggcatgattggcattctgggctacctgttactttgtggtagaggaccacgcgtgcatgrtggactcaaggaatgtctccctgcagtgccctgggcatactccttcctgtctcagcttaaatgtcacctsttctccagccacggaaacatcctcttttctcctttatggcacccactatcatttgcaatgatagatttgcttgtgtgtttctttaatgagttccccagtaggctctgagctctgtgaagatagaacctcacgcgtcaattccccaccatgcatctaatgctcggaacagtgccyggcacacagcacatgctcattacattatggaygtgtgtggaaagaatgaacaaatgaatgaaaagtcagcatttaacagtgcttcctgacagatgagaaatgctcatgtatggcaggacaggtggccttcaataaatgataaatcaaaaaacagagtcttttttttttttttagcaaaggtagccaaatatcttttcctacattgtgatagttcaycaaaaaaatcatatggaggggcaaaacgaatgtgttcggttcagwacagtggttctcaactgagatctgcaggaggcattgtgggttctcctgactgggggaagagaaggtgctgytaaccctccagcagtgcacacatggcccccacaccasaaagaaatagcccagaatccctgtcgtgtccaggttgagaaagccckccttagaaaaaatgaattcaagtgatgaaatggaatgggcagctaaagcaaaacagactcaaggaatgtcctcagatgtccctgtgttttggtggagacagaacaaaggctatggcaaagtgatcattggctggccttgaatcagaatgagttttaggaggattttcttcgtagtagctgcattgataaaaccgatggaaaagccacttctgaatatccataatatttccacgagaatgttaaaaaggaacaaagcctccttatccctctaaaactaaagtaagatgaagaacaggtgctggaaagaatttgataaaatgaaatttgaagtatctgagtgatcagctgcaaggcaaaaaattcattttaacatcaacaagcattacattttctgggagaaagagcagtaggaaataattcatcttccgtaacaatctggatggcctgcactagagtttgaacctctccgaatctccatggctccaaacagcacaggtgtgtttctcacacatgctccgaatcctccttttggctcggaacccagrtgaacagaggttccgccacagaggaacacagccggagaggacagcaaagagtcccccgccctggggcttctgccccaaaatgacagtgttcatgtcattggctgaaggagatcacatgatcaccccagacttcaaggggtggagaagtgcacttaggggcaggtgagtgtgagcggcacccacgtgcaccacacagcttgttagacaggtgagtcgggtwmcaatcaagggcaccatccaatctagattaacaaaagttcatctagaaatcccctaagtatgcatgtattctgagaaagacgacgtccacactagtctcccaaataactcggcttccccacaactagagatgtgagaatarcatctcataaaacttsttgggcctcaatcctcgtttctctgtcgtggagtttccttcttccgttaaagagggggcttaggtaggcagaaccctgcaggagaagcagcctgagagaatgggctcctgacccccgtgactgcgatgtggggaatcccaccaggtggccagtgcaggaggaagggggcacacagtagaagctcgaagtgtgatgttttgtgccggacttagaatcacttttgtttaagaaacaaggctgaggcctgagtatccccggctgctttggggatgtgccatcatttgagaaataacrtcctcctgcctttcctaaatgcagtggaatgacaaaggccryggctgaaggttgagaagcttgaagttgggagggcccagggcacacctttccacactccattcccagactgtaattatcttgggggaaaaatactttttaaatggtccacaggtcatcacaggccttagtgggcaggtgacacagcccaaggaaacttgaaggagggccttgattggtgtggagccctgatatggtttcgatctgggtccctgcccaaatctgaagtcgttgtaatctccaatgttggaggtggggcctggtgggaggtgattgggtcataagggtggatttcctccttggtgctgtgtcgtgagagtgagtgagttcttgtgagatctgggttgttcaaaagtgtgtgggaccggccgggcgtggtggctcatgcctgtaatcccagcacttcgggctgaggcggggcagatcacctgaggtcaggagtttgagaccagcctggccaatatgacaaaaccccgtttctactgaaaatacaaaaattagcccatcgtggtggcaggcacctgtaatcccagctacttgggaggctgaggcatgagaatcgcttgaacctgggaggcggagattgcagtgagccgagattgagccactgcactccagcctgggcgacaggaactctgtctcaaacaaaaaaaaaaaagaggggctgtgagacctccctgccttctgctctcggtcctgtgcctgctttgccttccgccgtgagtataagctccctgacgcctccccagaagtggctgctgccatgcttcctgtacagcctatggaactgtgagctgattaaacctcttttctttatacattactcagtctcagatatttctttaagccctctgagcagctgagcaccagagaaaccaactctcaattaattggtaggactctaaccctcactgttgtccagtactgagtcctgagccacatgcggccattgggcccacgtgaaccatctttctaagaccaagtacaaaaaaacaaatgttcttatgggctgagttscatccccccaaaattcctatgttgaaatcctaaccttcagtatttcaaaatrtggctatatttggagatagggtctttaaagaggtaattaaggtaaaatgaggtcattagggtgggccctaatcgaatctgactggtgtccttataagaagggggattaggatacagacacacacagggaagaccatattgaggatacagcaagaaggcagccatctacaagccaacgagagaggactcagaggaaaccagccctgcagacactttgatcgcagaatcctggcctccagaacagtgaggaagtgaatgaatgtgacttgacgcccccagcacctactcagtgcttcattatggcagccctggcaaactaataccaataccaggtgtctcattcatttgtttgtatagatttcatgttgaaatagtaatattttagatagagtcaatattactacaattaattttactctttaaaaggtagcagctaggaaatgcaacattcacrgatgtggctcctattggacggtggttcctgttggacggtgctgctctgagtcaaagactttgctcttgttgagcgccaagaacatcgtcagaccagcactgccrcccacatgcggctgggaagcggaagctgcccactgtcctgtggggcctcacaggcagtagaattgcctgcctgcctgttggtatctactccttagactacaggaatatttaaacagcgaaaatatttctgaaagagttacaaaatggggactcaagtctggaaagaataaaatgtatgtcgaaatggcaaggaaaaaagcatgatcacaagcaccamgatatgatgtttttttcctgtgactcartktcatttctgtagtggtgaaacagctgtcaagactacggcagttaccagcgggaacctggagggaagggtgacttgggagttctcacatggcccttaaggaaatacagatgaggcaaataggagagaggtagaaacaggcagytgccaagataaggtgtaagaaatcaagaaaaagcagcatcttcttgttggagcaagacagagttttccgatacctattttattattaaaatttagaattatgcgcctcggtgatgttgttttcatttgtgctttggataaatcccattataatctcatttttcatttcccgggcttagcaaggataagtcacgtttgctcctcaggatctgtctatgcacgtgccttagggaatagcgagccttccccgctgacagactggctctaagatctgcaccatcttgrcccacttctacctgggccacttctgaacaactcgggcctctgggcagaagccctgctgctagatccagttcactttgtgtctccttgtaagctctcggtccctctcacctgggtctgtctgagatccctacccactctcctccccaaggccccatgcctgtctccacccttccgctcctgcagatagatagcagtctggtttctaataaagtggcctctggatcacagcgtgaactgcttcaaagatgcccaaacctcagggattctcccatctcctctgcaggcgatccaggcctctcacctggcatgaggccccttagagtaggaatcgagcctccagatgtaccctctcatcacccacagcatctggccttctgaacatgccctctgttccccaagcccttgcaccttcccatggtctgccccggcgtggaccggctgcttcttgctgctgtctcgtgtgacggctgccatgacagctgccttcctgccttctgggcatatttcactgctctcaaactttcgtggcttttggagttcacyggsgaatcttgttaaaatccagattttgattcagctggtctggggtgggccycgaggctctgcatttctgagaagctcccaggtgatgtcccagctgctccagggaccatccctgagtccccagggcctgtgctgacttaagctcctgagagcagaggcagtggctgtggctgccacctctggatctccctctgagggagctgtrccgtggcctgggctccactccatttttttaaatagctttttaagrgtggttttaggctcacagcaacatggaacagtgagtacagccaggtcccagacaccccctgcccacacacatacacaggcayggggctttcagggtggtcatttgttagtgagttgagcacattctggccagcacttgagcaaacagcacacratcaagaargtggccgtcacccagactttccacaaagttccttatttggggcatattttgtttgttaacggatcttgcatcctgactcagactgagcccctgggagagcgaaaggccatgcctcccacctccccacccccagcgccgggtcgggggcagatcccaccccactctgccacgtgccgcatcacagttgggttttgtcagtgtgctcctttcccaaggctaacactaacttgactttagcacgacrttcactgcaaaggttatggatcagacggagacaaattcttgcaagagcagggctggattttcctgtctagaatcttgtatgttaaaaataacaatcttccgtccaaatgactacagcagtttattamgtgaccgaacgggcagacaagcatgcagggagggccgtcagcatccacagaacttaccgacctgactgagagcrccacgtgcaccaggctcacgtcctgagcgtgtgcccacagcccttggagtgtttacaagaatttccttggttcgatcttacatgtatttcattttaggggaaacaacgcaattccagttttacaaatgtattggggtaaggagacttaagacctcagttaagcttggagaccagtgattacyggggcttgcaagatgataaaatggaagccaggtgggacgtcagtctggcaaaaccatgacccggctacagctccmctgayccagcctgtctcctcgtggcccatttccatatgcaattaaggaaatcttcattacrtacttactctgtgggaaggatatacaccctagagctcattcactgtttgaaatgtctacagcttcctacgggaaataggggcttccagaatccaggacaagcttgcctctggacaaggctgagcaggctgttaagggagcaggggtccccatcccaggccccctgcgatggcatctctctgtgctccccgggagagcgggcgggggcagggagagacgggaatcgggtgatattaaagtttctctgcctttgtgcttggaaaccagcaaggcaaaatggatttgctgctgttttatattggacacgggcttttgaatgatgttctgttatctttctgtatttcttccccacggaatcattcttctgtttttgcctttccaccgttttttaaagttttgaatgtctttcagcctagctcttggtttcttaatctttttctttctctctgcaaaatgtcatttccatctgtttccattttcattcttttacgtttcytccttcccgagctaataatgactccttgctctttttccattccattcttgccgcccgcctgagtgtgccccaaaagccttctgtttggttttatcatggcagaccagtgttcttttctgaagatgctctgaattgtctgtcttattgtgtttggttgaggcctagtaattttcgataaagcccttaatccaagtacttgactgaaaattaccaggcttctctgtggaggatgagggtcaaaaatagaagtccttctatgaggaagatgcagtcagagtgagacagtcagtattagccaacaccagccacctctgaaatcaagaaacagcctggcaggttgacaaatgcgatacataatttrtagcccaagtgatatatgaagccctgtgactattttcagctggagctctgttgtattttcccttaaaataaccttcccttgacaaagttcacactttgccttgcaccaatgtaaaaaaaaaaaaaaaaaagcgttttrcwtcattgtgtaaactaaaaataggagtttggagcaaatttccatttttggtcaaatgtttgcatctcttttccaagtatttggggtgaaattttcacatcttctaagtttccctttggaaacacagttgttattaagagggactgcaggtcaacataatgaagccctcatatgggtttcttgttggcatttctagaatttttgaaaatgtgatattagcagaacctattcagccagaatttggcctgaatattcaaagagatcatatgttcattatgatttgctcctatgcagtaattgatsatcaaagcatgagaaagtccattttcgagtcagtaacaacamtgctcccttagcttatgtgggatcactaacaagcttttccacycaaagcccacagtgtgcccagtgccgtcctgcgccgtgaaataccgagatggagccaggcccacctcgaggcgattctagcatcagggctctcatatgagcagataaataacaaaacccaccttccgcccatcacacaggtgggcgctgggtctccctatcccacaggtgcaggagtgatgccttcttttggagagctagagaagacttcacagaggtggttacatttcgtgcttcttgaagagtraaattaagtttgccagatgatggctgggaggaacrggaatttcagagtgtgagaatagcgccagaaggggaagagctcctgatgacatctcgcttttccggggaagtagagccrttctgggagatagcagtgcaggggactgtcttcgtcccttcatgctcctataacaaaatgccacagactgggtggtttataaaccacarattcatttctcaccattctggacctgggaattcctagatcaaggcactcacagatttggtgtctggagagggccctctgcctgctccacataagtagtgccttctctgagtagtcatgtcctggcaggtgtggcrgcgctcttccrggcctctgttttgaggccactcatcccattcrtgagggctccaccrtcatgacctaatcaccttcgaaggcctcatctcctaatgccaacaccttgaaggtgaggatttcaacccgtgaatttgagggagacacaaatattcagagcatagcaaagacattggagctagtttgtcagtggccctgtattgtctcctgaagatttggcttacaaggacccaatggaaatttcgtgaaagtagaaaataatgatttcattttcctcttttcagggggtaattctggcaacatggtggcagcagacttagaggagggagggtgggagccagagacgagacgaggggtggggcattgggccaggcctgagccccataaagccagtggcagatggaagtgatgtcatgagacttcaagttagcagattccacagtgtcaaagacccttgaacagggttaaagccagaaaagcaagtgccaggggtggctggggcacccactggcctagaagccaagagttcttgccgggaggaagatgtaggaagggaatgcttcacttgctgcagagagcagatggaggtcctttcatcctttcagcattgagcaaggcagcgagggtgcacactgagcagtcctgtgcagggcatttaatggagggtgtcaaggaaagggagaaatgagcagggtcacagctgcagtgatgctgggtgcatagagagccctgggccagttcacagctgcagtgatgctgggtgtatagagagtcctgggctaggtcacagctgcagtgatgctggctgcattcaagaatcccgggccaggttacggctgcagtgatgctggctgcattcaagaatcctgggccagttcacagctgcagtgatgctgggtgcatagagagtcctgggccaggtcacagctgcagtgatgtttgttgactccccagcctgtgccctggatccccctatcccaggacatctcaccagcaagtcyrcactctccctttgcagcacccatgtgttgttctctgtcagctcccaccctcccacctgcaaccatgccattattgctctcacctttaagaagagttcyttcttgttccaactcccctgtccagccactgcccatttctcctcctctttctacaacactccgtaaaggatrgtctgcacttgctgttcctctcctcctgttgtctctggagtccactccctcaccagtggccagtagctgcctgtggaaggcaggagtgagcagcacggtgtctctttctgtccagttaaagcaccgagcaagargcaactgtatctcttgctgcctgctttagtcttttcaaggtctttctttgcaaaactacaaatgtcctggcctaaagaaaaaatgycatatctctgttacaaaaaaaaaaaaaaaaaaatcttcatttttttatctagggcattacaagctcagtgagtagttttctgttttgactaataaggacttgccgtggaataaaggagacatgttgatgaacataagtgacccgggcagtgactcctatgtgatctgagcatgagttacacgggcagcgactcctatgtgatctgagcatgagttacacgggcagcgtctcctgtgatctgagcatcagttacacgggcagcgactcctatgtgatctgagcatgagttacacgggcggcgactcctatgtgatctgagcatgagttacacgggcagcgactcctatgtgatctgagcatcagttacacgggcggtgtctcctatgtgatctgagcatsagttacacgggcagcgactcctatgtgatctgagcatgagttacacgggcagcgtctcctgtgatctgagcatcagttacacgggcagcgactcctatgtgatctgagcatgagttacacgggcggcgactcctatgtgatctgagcatgagttacacgggcggcaactcctatgtgatctgagcatgagttacacgggcggtgtctcctatgtgatctgagcatgagttacacgggcagtgtctcctatgtgatctgagcatgagttacatgggcagcgactcctatgtgatctgagcatgagttacaagggcagtgtctcctatgtgatctgagcatgagttacacgggcagcaactcctatgtgatctgagcatgagttacacgggcggtgtctcctatgtgatctgagcatgagttacaygggcagtgtgtcctttgtgatctgagcatgagttacacgggcagcgtctcctatgtgatctgagcatgagttacacgggcagcgactcctatgtgatctcagcagcgtctcctgcatgacacaggtagtagctcctctatgacccgggcagcgactcctgtgtgacccgggcagcgactcctgtatgacacgggcagcgactcctgtatgacacgggcagtgactcctgtatgacacgggcagtgactcctgtatgacccgggcagcgactcctgtgtgacctgtgcatgtcctgggtagtgggtgctgcatgtcctgggcagtgactcctctatgacatgggtcatggctcctggatgacacaaatagtggctcctggatgacacaggaagcgactcctgtattacacaacagtgactccgatttggcaaggcagaggttcccgtgtgatggggctcctgtgtgacatgcagtggctccagtatgacattgaagtggctgatccatcttgtgcacacttggggtgactttggcatcattactgcaagatcagtcagctttgagctgcagaccgtctttgctggtgcagggaatcaggcctgagtctgtgtcagaaaggtctttgcaaaaagtcaatcctgcacccacatcagtcagtgccggttgagcactccaggaggaccaaggatgaggcttggctcaaggaaaaagcgaggggcctggagagagtggtgatgcttgcaaagggtctccattccttgcagcgtagttgcaggcaacaccaagactagctgggcccttggaatcatccaggcccacctcaccagggccrccagccccacacctggaagggatgctgtcactcagcacgcattgagcaaagaacggactgaacgcagcctcctgctagtcctgggcctccctggctcctgtgctgctgagggacctcccccagagttccagattcttccgcaccagtgattttaatccattttgatgtcagagacctgtgtgggactctggaaattcagaaggtaattgagtatgactcttttcccaataactgctgtgaaaaaacagaacagatgaattttagaagaatgtctgaaattcaagcatcctgtgaggtatctccactggtgagttacttacagctagtcagcaaatgaaaccagagtcgcccaccagtatcctggtgagtcatcgccagcctgaattattagaaagggatggctgtcccggctggcatctttcctttcatctgctgctgttcccttgtcctgtgacatccgtgttgtcatcctatcagaattgtcaacatcacctcatgggtaagaaatcaattcctgctgtgttctctacagctgcttctgtctgggaactaaggaaggagctttattataaaagaaaatttttattcaagtttctattcatggaacttgaagaaatggaacttcctgaaaccaagaggttcagaagaatagagagaagattatcatctcaagagaacacgtctcgtatcatctgggggaaagcagggtggggagaccgtgctcmgtgctgcaagtcaaccggcaatttcaagaatgccgtaaattggattaaggatttcgcatcagaaaataaagctttctgctgatatggggctttttcatttggggctgtggcaaacctcataagcctgtagcacttctgagaacggagccaaaccagggtgttcaatcgcagaggttaaagtgattctttcactgagataatctaaatctagatcatattgaatctgccttctctctggcacggaaacattttccaaggtattcacgttggaagtatgaattacccacactctctttaaagccccatccaattaaaagtagatgaaaatctccttaatgcagagtcctttagaacatgccaggggtagcagggagggatgagagatatatatttataggaaatctgatagaagataccaccatgcaacctgagggtgagtctgagaagatatttactcatgacttgtatttcttttaaaaacaattacttttgatatgtatctaaagtatcttctctgtcatttaggataaaaacagattaggcttttactcaggaatgaattagaagccctggcattctaggcagctacagagtttgtatccgcttgcagaaaatttaaaaaaaaataagaagaagaatccagtgtaagagacctacaaggaaaggtaatgttctctttgaaatggaaatctgctcagagaggaagtggtcactggagctttaaaaaaacgttaraagtagggaagttctcccttcctagaaaatgtgagccggggctctggcagaggacatacgaaagacttagagcagcagactgagatattccaggaatgggaggcaactttaaaccttcagcaggatgggggagacagacagatggggactctgggaagggaccaggtagcagagcagggaccgtaggcaggatgtcttgggccacctcctaccctccctggacactggtcccagctctgaaacctttgtcttctttgggcttacttttattttgttattcaaagtattaaaatgcagctctgattgtagaataacttttactctcatcaaaaaaaaaaaaaagcagatggtttctttacgtcgtggctatgacaagagtactttgggagcatttaagtaaaacagtgttcttaagtttattgggtggctctgaagtgagtgaggacttcagtggggtcatcctggaaaggaaaggcaaaggccagtgagcgggtgggggctcagtgccatgggtgacccaggtctggggcttggcagtctgcctcccctgtgggaacctgcagttcaaggccagcctggactcttttcaaatccatcctggcaggaggtggggaagcagcttggaagtgctgctatgtggccatcaggagcaaggactttcaaaaaggccacgctgggtcaagcccaccgcttatctgctgtgtgtccttggcaagctacttaccagtctgatccctagattccttatctgcaaaatgggtataatgcagatgcccacctgacaaggtgattggaggccttaaaccggagagcacaggtggctggacatagagtaagctgggaaaagccaaaatcacctttgcaaaaaaaattaacagtgaggaaatgatggcagtaaaagagatctgatctaaatcctcacccacctcccacccccagtcatgsctctcctgtaatcattcctgggctttggctaagccaactttgggagacctctagtttaaggtttaaatgataataggccttccctaaaactcagctgccttgataaagctaatgaaaggccatcaggctaggaagaggggagaaacctgaattctgctaaggtgtagactgctcacaaaatatacaacttcactatcgtagatgagccttttgagatcttttcaggttttttgcatgtctgacacctggctctacccagaccaccagccccactcctatggcccacctagaagcaactcagctcaagaggacagctctgaccccctgtgatttcatcagcagcaagcatccattacctggycgccaccaccccttctcccaaactgcctttgaaaagcccctcccctaggaacctttggggagattgatttgagtaatgacaccgtctcccacgtggcggtgttactggccgcaaatctgtatagctctgcagcaacctcagttctcaccttgtcagaagaaggaattcgattgaggggcataacgcagaagaagagaccgaggcaagtttcagagcaggagtgaaagtttattaaaaagttttagagcaggaatgaaaagaaagtacacttggaagagggccaagcagacatcttggaggtcaagtgccccatttgaccttggacttagggtttgatatgctggcctacttccagcgtcgtgcaccccttttccggtggaatgcccctggaaggttaccagttaaactccgccattttgcctctcaattcacatgcttgggcccactcacccagctcctgagatcttatcaggaagctgctgatcaccagcttgtgtttctagctcttgggaaactgcctttccctggcactgtctgtgaccaattattattttagagagacagtgtacacctgcctgaccatcatctgacggtcacctgactttcctggtagggtgtcaggacagccctctcctgccccgctcatgcctgactagctacctgctgtaacagcatggctggccttatgtcaattaaactctttctttactgcaatgccttgatctttttttgtgcagcaggcgggtgggggctcagtgccaagggtagtctagattcgcggcctagaaagcctggcctgttgggtggttccaaagctgcgtggttcccctcaggactggcgctaccgtcttgtgggaatgatggaagttgaatgcagcatataggaagctttcctgattgtaactcagcatcctgcagttctgttcactaaaccttgttaagcaggccctggattaaggtccagaggttttacaggttgataaagctgagcccctgtcctcaagggcttatattctctgaggaggaatgacaaagggkcatgctagtttcagtaccttaccaaaagttttgaggcagcaggatcctgggtctttgtgggagcacagaggaggagagtgggcggcagctaggaaggcttcctggaagaggtggttcctcttacttttccatggttttctccagtaatccgctttgtttttcccaagaaaaataagggaaattcaggccaactatctatcaaaaaattattccacatgtgtcaaaagcttatcaacattttaatcacttatttggaaagttacttaccttacaaagttcccccttttcaaaatgataacaggctttatatccatagcatagtcacacacatacatcaaactttctgcaagctttagtttagagtcgaagtctgccctgttatttctgatcattggtgatattcgacatagcattttttaggtggacagcttgggaaaagagccaagtcaggcgcccagtttctacataaatggcaccccacagcctctcttcaccctacggttccttttccctggctccaaggctgctccgacagacgggcttcgggccacagctggcagcaggagagcaaagacaggagcagtgaggactggctgacagactgctgttaccatggccagaggcctgcgtgattgacatgccagtgattgacctctttggccagctgatgccgcaggtcacgagccaaaagacatgagactcaagaaaatatttgtattttttcrgtgttattcccataatgtttcattcaaatgtacttctacactgttttattttgaatgattgcattcctgtttgactctttgcacaattcaggcctcggcttctctttcttttctttattttaactcacagatgtgggaggaggccattgccttgggcaaggagctagccgagcagtatgagaacgaaatgtttgattatgagcaactcagcgaattgctggtgagtctttatttctttttatttaaatgaacacaggcaatctcagctggtttttcaggaatctctctttccatgtcaatgttagggttcaccccaggcactctgggaccttggccatgtccctccgttttgcctaggaagatggttttagttaatttgctggttgatatttggcccataaatatttactttttagtcccaagtcagctcttataaccaaactcttaaggcttctatgaayaaattgtacgtaaacaactgctgaccttgtgtatagcggtcttgacagcccaggagtctgtgaacatttgtactagtttaaaactgaccccaggccaggcgcactggctcacgcctgtaatcccagcactttgggaggctaaggcaggcggatcacgaggtcaggagatcaagaccatcctggctaacacggtgaaaccccatctctactaaaaatacaacaaagtagccgggcgtggtagcacacgcctgtagtcctggctacttgggaggctgaggctggagaatcgcttgaacccaggaggtggaagtwgcagtgagctgagatcgcgccaatgcactccagcctgggcaacagagtgagagtccgtctcaaaaaacaaaaaaacctgaccccttctatgagagagggatggatagataatgaccagacctttcttctgccatgggaatgctgttagtttctaattgctacctcctccaccttgtcatttttgtattcagcagatcaccttaatgatgtgggaatgtctgtcatgaatttagaacagaacgattctgttcctttaaattctctttgaacgtatcccactatctgacctataccttttaaaaaatactaagggccagccatttctatggcacttctttggttattgaaaacacccataagtcacaactttttgctgaatttgggctagttggttcagattcccttgcggaatgatggagaatgagtgaaaaataatgtcaaaacgatggagtgagatgaaattcaggtgcaagcctcagtaccctctcccaccatctccctctcccaccatctccccctcccaccctatagaagttgccagagcttttaaagagcccgcaagaagaatccagaggcacacatgcttgaatactcaaacctgaaatgcattttcttttttccttccagaaaaaacaggctcagttttatgaaaacatcgtcaaagtgatcaggcccaagcctgactattttgctgttggctactacggacaagggttccccacattcctgcgggtaaagtttggttctgcctaatctgagccatgattkttcccccagcagaaaatccccttcccgttctgaggaagggtggggagtttgcatccgcgtgggatcgtgcaactctctacactgccatagctcggtggttagcccggggggcagagaggggttgacaggattttatttggttgcatataacctttctatctgatttttccgtaaaaggaccctccttcagagatttacacgtattattttaattgaggtgtgatatatgatatgtgatactatttgccatcttagccatttttaggtgtgtagttcggtggcattaatacagtcacgttgttgtgcggccagcaccaccatctaccttcagaactttttcatcttgcaaaactgagattctgcatccattaaacackaactccccattctccctcctgccagccccagcagccaccgttctactttgtgtctctatgaatctgactgttgtagggaccttgtattagtggaattgtacagtgttcgcccttctgtgtttggcttgtttcactcggccgaatgtcttccagtttcatccaggttgtagcatgtgtcagaactttatcctttttgaggctgaatggtatttcattgcatggagaggccacattttatttattcattgatccactgatgaacatttgggttgtccccgcccaatgtgctgctatgaagatgtatgtttttaattatatgggaaattggaaatggatctgtatggccacggtgctagaaactccaaaccaggctccatccctgagacaggcatgtgctttcagacatgtaattgaagcagtaaccgtgatcacctgccaggtgcccatttcccagtattcacatgaggccaaaggagaagttacataaatattaatagtgctgcctggcctaccatagaattgtttatacattttctcaagaacacattctttggatgccattgaccagtgggtcatgatttcctgatatttcttatgactttttttttttttttttggacacttggttttctcttatcctaggagactatgtgtgattgctctggctttaggaagcagaagctctgtgtcttgagcacagccgtctggggcagttgaaaccagttgggagattcccctggttccagacgttgttcatttggggtcctgtgtttccgactccacgggagtcactaatagtgtgacatctcttcatcacggcacccagaggatacagacctccccttaggaagggcatgtcactgttgacaggggagcaccacagttctggcctgctctaggaggtgaggctggctgcccactcagtgtcctgcctggtgacggaggcgtctggccctgtcctggtcactcctggtcactgctggtcagcttctcctcttgccttcatcgtgcagcaaagacagcggttgatcagaagcacagattctgaacaaagtcttcccttccaaagaatgaataaaggaggcttagttacaagctctaaattagagacaaatttgaaattagcttcattctcaataaaaaacaaagctgaagggtggaatgagcttggagttaaagccacttactgttgctaaaggctttaattcgagtgtgtgtgtgctccggaacatacatctttaggaaagggaggcaggtggaccctaagccatgcagccttgtgcartgcttggtgttagatggtgcgtgtggcccctgtggatggagatctacctctggtatgtaggcaccaactctggatccgtgcaggatggttatcccagaatccagagcaagggagcagcctgcgtggaatattatgtgagggcagtgccgggtgcggaggacacgttgcagctcccgagccaatagatgccaggttgtgccaggagctcacacacagcaggctccaggggcggtgctgggtcatctccaccaccaaaaggacaaaatgaaaagtccgaatggaggttaacaggctcgattaatattgaactgactttcccgccacacctggatcattctgtgggtctgcagcaatatatttatcacacttcacagatgagctggcaggggtcaatctgccaatgacactggcagttaccaaaacgtgggcagaatgtttgcgtgcttcatgccctgctggagaggagcctccaagaactgactagctgtcccttttgctttgtttttctctaaaaattggtctcactgttttttgtgctcatgttgatatttrtagaccttacaaggaataaatatctttgactatatgtacatttcccccttgttttcatgttcaaaaggatcacttcagaatgcaaagtaactgacattttcagaaaatgttattcgtgtttttacctataactcactagcttttttctattaaagtctttatatacatttttattattatgttttctcatgtaaagcataagaaaaatgcttgctagtttgatagtagtctgttatccattaaatcttactgaattttggaagtgcgtggctttatatagaagccttagaagttgctcagactgtatttaagatgacatattatctggtttctgcttgacttttttttttcgggggggcggtggggagaaatagagcatttttcttccataatggtacttctaagacatatctaagcacaaagtgaaaaagaattcaattcttaaactggttctttttttagcgatttaggagaactcagaataagctggggcaagggaaggggactgtcttagtccactggggctgctgtaacaaaataccttagactgggtactttataaacaacaggaatgtattgttcacagttccggaggctgggaagtccaagatcaaggtgccagcagatttggagtctggggagggccattcctcatagatggcgccttccacctgttctcatggggtggaaagggcaggcagctctctggggcctcttttctgaggcactgatgactttcctaagggtggagcctttccagaggccccaccttctaatactatcaccttggtgattaggtttcaacatctgaattttggggactacaaacgttctgaccacagcagggatcaattgattcagtgtcatagaatctctcttaatccttttgaaaatcctttagttagacaaattttaatttgacttcaatcttagtctttagggggtaagtgtaaaaatatgcagcaaaatgctgtcctctctgtctgtctctgtctctgttcgtctccctctctggcacctgtccaggaatgactgcagatggggcagggctgcagctgacttgggagcagccaacctggaggttcttcccccgtgtcccctgatcaaagaacagaagcacctcagcaaccacgccccgtcctggaaagtgttacccccccaaccccagacttctgtttcttgtacccctgtggcttctgctcgctgtcttctccttgtggcagttttcatttcggttgagacagccccagatgggacaggatgggtggggggaggcagaaggcttccaaaaccagcagcagcattacactaggtactcattggcccctttctgtgaccgagttcacactcagaacacacgtgttgaaatcgggaaaaaaacggagacctgttgtatcttgcaaggaaaacgttccttacaggtatatttacagaggactgtgtcacactcaggcagaaatgacctcaacaagacagcctcgtggaaggaagaacacttacctacttaactcccctccccgccccggrctgcctagtctagcctagccgtctataacaaccccagtggactgacattccatcttggaatttatggaggtgacaaaagtgtcatttgagatggaccaaacccagcccttccaagaagagctctgtatgttttatcttgacatgtgttgatgaataatgacctgcacacacattctgaatgcaggaagggaagtcctgctctccgtccatcgccagtcactcactcgggggaggccaggaacttagtagctctcggctctggtctgcatcccttcccctcgggttctgctcgcctcggctgtgtctcacaggagtcagcgcccggcggccgtgtgcaggtgctggggccccaccttagctcaagctctcttaaattccttatggcagaatgaaaacaacttcattagggcctacctgagaagaaaacaaaaacaagaaaaagygtggacatcattatccacttgtcctggctgccttgcccccttctaaccatttcatgcccattctagtgtgggcttctgagtgctcatttggtttttcatatagtttttaaatcagttgttactgtcaagatgaaaacatatcacagatgttagtagcgcagtgctgagtgcttcttaaacagtattaacttacatgcttgatgaccatgtgttcttgattaacaaagccaacgcaagtacaaaaaaaaataaaaattacaagttgttcttaaatttaatgacattttgtaagaacccgtaaggcatattttaaggccagcatattgcatgtgaactcttcctggccctttctctstggtgttatgaaatgaatgtcacccttttcagggaaaagttttcatttaccgagggaaagagtatgagcgccgggaagattttgaggctcggctcttaactcagtttccaaacgccgagaaaatgaagacaacatctccaccaggcgaygatattaaaaaytctcctggccagtgtatcctttaagacaacctcatcaactctgaaaccatggtgatgccattcatttgggtggttgggtgtggtrgggggcctctctcatggttgatgtctatgctgccttagtgatccttaacyccctcacctcagatattcagtgcttcacagtgaagcccaaactcgatctgcctcctaagtttcacaggccagtgtcagagcagattgtaaggtaataatcccatttttcttacccaacgtgagggttgtaagaggctgtgtacagatctcttgctaataattccaccttttaaaggacggactttggccatggattcgctttccaaatgctctttctgtcctctttgaagagcaagggaagctaattattttcagcatccaaaaaaagtgacaggagatgttaatccatgtgctgggagcrtgcaaagcctattcctttcccaaagtcagctgacagcaaaaacctaagagggcagtggaggccgtctggtctcctttatagacctgccctgtggggtacaatcccctagggaacttcacagcagtgcacaagtcctgccygttcccagcaaagccragttcatacatgtgagtgtggcctgaatgtttgcattttagaaggcrggaaatgggatttgcacatttgctcctggtgacacacaggagaacccttcagccttacagcacagcaattccataatgtagggttatgagggggcttttaaacctcctgagtcaactrtccatatttgagtgagattttctgcctgtcagttgtatcgcacctgacttagcaatggcatagaaagacctgctttagcagatgtgtttgatattaagacttttctgttctgtttgatccatgttctggtgaaaatattaatctctttgatgacctcatattccttaggatcagcttcattttgcttcctgaagtttggtggtttctttaacctttcatcgtttctttgaccttgcatcagcaataatgggaaataaactgggaccctgtttatttacaaatgattgctctcgcaaggcatacattttaagggttgcaacattttttttcagaggccttaagcaaatagtgacgcttagagccttctcagatgcagtagtttcttttgctgtggaagcctgcctgcatttcagtgcaggggagaaatcagtctcagtctctccacgccctgccctgtgcatgcggaaagcctgcctcgtaccccgaccgcggaggcaggttacttatgtttcctgtgtgtcactcttggggtggttgcaaaatctgtgctttgtagatctgaaactaaggtatgtaatacttttttaaaataataataaacacatacgttgaacacaaaagcttttttctctctccttcgcttcacctttcctctgtttttgctcatttcactcttactcagcttctgttttccctcgagggttggcrgggacagggaagaggcaaaaactcaagttaatttttccacctgccaacatttccctggckgggagaggacrccaaggcgatggcttcaggtcaaggttagggacattttacaggaggcagtgacatgttctaaggccagaccccgtgtccaaaagcaaattggctatttgccgggttaaatatctaatgrtctgtctgtctctgtacagtttttacagggtgaacgaggtccagcgatttgaatattctcggccaatccggaagggagagaaaaacccagacaatgaatttgcggtaaaaaacaaacaaaccaccaaamcaaacaacaaaaaatatcattccrccaccagtagaactgccaytggagaagcgtggcctcagaggcagccacggagccatattaaatgtctttgtgtattatgtgcagaaatcttaatctattaccccctccaaagttagraaaactaattgccatttcactaacaatatgactaaggtcactgagatatttaataaggagactgtgccgtccaaatgccggagctcccatatgagtagcgcactgccttccctgcgagccccaggtgagagagcaggtgcctgtcatctctagttaaaaatggacccaccgagtgctgaggtgcggggtgctgacgtggctttctgcaggtgacacagyagtcagcacatgaactggatctggacccgggtgctcattcctcattcagtatccagcacctgaacttcagtggagcacaacacacaactgcagggttgaccccagcactactagcaatacggaccgggttattctctgtggtggggaccatccagtgcatccagggatgtttggcagcatccctgaacactgcctactaggtgccagtgccaccaccccagttgggacaaccaatcaaaaagatttccaggccaggcatggtggctcacacctgtaatcccaacactttgggaggctgaggcaggtagatcaaattagttcaggagttcgagaccagcctgaccaacatggtaaaacactgtctctactraaagtacaacattagccgggcgtggtggtgcacgcctgtaatcccagctayttgggaggctgaggcgggagaatcgcttgaacccaggaggcagaggttgcagtgagccaagatcgctccattgcactccagcctggggaacgagagtgaaactccatcaaaaaaataaagtttccagacattgcaaaataaaacatctgccccttgttgcaaaccacggcattcgagttgtagaaataacagcaaacatctttagagccttttttctttatttttttatttttatttgtttattttttttgagacagagcctcgctctgtcgcccaagctggaatgcagtgccatgatctcggctcactgcaagctccgcctcccaggttcacgccattctcctgcctcaccctcccaagtagctgggactacaggtgcccgccaccacgcccggctaattttttgtatttttagtagagacggggtttcacggtgttagccagaatggtctcaatctcctgacctcgtgatccccccgcctcagcctcccaaagtgctgggattacaggcgtgagccaccgcgcctggccctagagccttttaaaaattctacatacaaactgctttcatggattcatttgtatttttattttatttatttttttatatagaggtggggtctatgttgctcaggctggtcttgaactcctgggctcaagtgagtggatccatgttgaaaaggcatcaaataagccataatttttttaaaatgttaatgtttatccgtcttgcctgggaaacctccggaaatccttctgtactcctgtattgcaaggaggcattagcccggggacccccaaggaggaccggctctgctgagaatggcttctcttgtgtgccgtccgaaggcatctaggctgcaaaggtcaaaggtgaattaacaccctactcctgaccagagcaaagctcggaacccttccagcagggttgcctcaagtaaagagtggtggctacccagtctccctcccaatccctcaggggtctgccagtcatgggatcctcagggcagtacctgtgagtctcctagctcagctcttaagagccatggggaagttccttccagccccgaggccagattccttgtgtgtcaccaaggagcacaaaggagcttggagttggtgaaatctgcagtattgtgcagtcccagcaggctggttgtttgaagattatgttcaccctatttgttggtgaacccagcaccctggacctcctccaggactggtcactacagtgtccattgtctgcaacagtgcgggcagaacctaggcacgtccaacctggacaccctcgctaagggcagtggctttcagagcagactgcacctgttactgtcatcataagcactaacgctagtgtttatatggagtccctcaactgtgggatttataggcagttcttgaatttccctcacacctctcccatctggcaagtagatatattcttagactataaagaaatagacacaaggaggtcaagtgagccactggagggtgcgcggccagttgggtgcagagctaagaataacgaaggctcttgacattttgagctatgctgagcctcagaggctatgcttcttctaaatggccctgaaatcccctaatggccctgttgaggtccgggcacttggacaaagtgttcggaagctgcaggatttggtccttcacatgccccacaaagccttagataagtgcaacgtcttttgctctactgggaagccagcctcggcccctccagcggggagcctggctccaagtgcagggggctggggaagctgcccaccaggccgagagcagtgcgaggtggctcatccctgcagacctggcaaggggtgactgatgtgctggggagtgagggcactgacgaggaggaagatgagacagggcctgcgtgaggaggagctggccgtaaagcccaggatggaacccagaggtccgtctcagggcatgttgacatgagagaaagcactggaatctggtctagaggtggatgtgagagggccagacctgtttccattgccaggacaaaaacctgagggagccgtccccatggggcaaagaggactggtgtgggacacggaggccttgcctgtgtccttatggcttcagccagctccttccctttcctcctatggaacgtaagaagtttgggataaatgctttccaagatccaagtcagttttctgaaaattttttttttttgagagagagtcttgctctgttgcctaggctgaagtgcagtggtgtaatgtcagctccctgcaacctccgcctcccgagttcaagcgattctcatgcctcagcctcctgagtagctgagactataggcacatgccaccacatctggctaatttttgtatttttagtagagacgggattttgccacgttgcccggcctggtctcgaagtcctgagctcaggcaatctgcccgccctggcctcccaaagtgctgggattacagacgtgagccccccacgcttgtcccagttttctggaatgactggcattccattatcccatctgcttaagtctagattcctgttgacactcagactgctcagtgaccctgcagtgcagggaggttggaatggcagaagattgttgcaagctagacagtacgaacgaggcagtaggataaaggatttccagttgacccctgcattggagtttttgtgcaatccttaaagagtagtagaattgtatttattgggttagaacagtttcctgcaataggtaatatactgttttacaaagaacacattgtcaaatgatgtttttatttaaaatatgcatagacacactttttaatacttagtaagaagtcttgaacaatagatactaaagcatataggttatcagcttcaggtaggggatggtttttcctcctgctctttccatatctttatgttctcatataaacatatattagttacgtcaaaacattttaaagtttaaaataccgactggttttatcagaacatcagaggtcactttgattaaatccagtctcccaaagatgtatttgccccytttagtttcttatgaacactgtagctaatgtaagacttctttggagccttcctcaaaatctgtttgctcaagaggggctccccatacctcattttggagtatacacatctttctcactcacctagtatactttcattgtcaaataccagagtggtgggcaatgttggctaggggacaggggatactttgatgtatcctgagcgaccgttaggtagagcgtggcttgtgaggtgctacctgaaggcacacatgccctgtgctgagcaccacagaccctgtcctgctgaaggacctgactcctttggagttattctataaatcccccttagggcagagctgtccacctgctgacawccttctaacccgtgttgtgtgtgtgtgtttcctttgcagaatatgtggatcgagagaaccatatayacaactgcmtataaattacctggaattttaaggtggtttgaggtcaagtctgttttcatggtaaggatggccccaccccrgaaggaattgtccgttcccttcctcaatacagtctgccacgccttcttcacctgctcatgcccygtggtcactgtggcagcgtgcacacagcagactctacagttcccrtaaccaccccacctgttcttgagagcatcgatatctcctcgcctagccatattttagtggaaatgctgtgtaatcacgaccaactctagcttatcaaaaaaccagaatgaagatttcatttcttcttacaatgtatttaaattcagtcrtagctgtgctgttttgacaatgctttgtgttaaccaagtgaaaagttgaagacaaattccagtctacataaacttttttaaagatttttttcctgatggttttattgccatttacatgacaaacaactattaattaatagtccttgcccatttcaagtaaaaatagcctgagaacatacccctccctgaccctttttaaagaaataacgatttccagctctcaacaaagctaaactttgctttgagatggggcagtttcatttacgtgaaactcacatttgcagtgagctattggacagtttcatttacatgaaccagagttgggctgcagatttattgacagtattgaaatgtcagggccaaggcaactggcaatataaaaacatctgattgaaatctgtacgtttttgttcatgtgtctcagtgccttttgttttcacctggcaagaactcactgagggggtggcacttgccatttagttttcaatgagtccccccgaaacacctgattatttgtctctaggggccggcatctctctgcccagctgcgtgtccagcgccgagccttctcctttgcccacaccagcatgagctatgggcagctatgggccactctctgagaggttgcccgcagtcagagccactgctttatactcaaagcacccagggctcttcacctacccctcctggggtcactttctgctctsgagttccctttctgtgcccctagcagccaggcagtgcctgacagatagaaggctgtgggagttatgtgtcaggtggtaaaaatgcactccctttgctgggtccctttgtagctagtgaggcattgtacatgtgagagacaacagaagagcaggccctccacctaaacaggccgtgatcctcttaatcaccctctgcccatgagccctttgtaatcggggcctgccagccaacagctgccggatgcaggagcttagggaggtggagaggggagccctgacctttcgtgaggatgcagcttctcctcgggctgctttggccattttgaacagactaagaggrcaggaaggcaaataatcccagaatggcaggactcacgtcctgctaccaaaccctgatgccctcctcgtgccacctgggaccaacccccgtgggatatctgtgggagcagcagctaaccttcttcaataaaaataggaagggattctttctcagtgcaaatgagattagtaacagggaggtaacagtcagtcctggtggaatactgccctggagtgtgcatttgttgaagctgtgtgcccgggatgaaatgtcgtagggcctggcaaagtaagttgtggggtcaggacagcatggctatgcctgctgtccaggacaccggacaaggggccctctcagcagggtgcacgtggctggccacaccagtgcatcacaatctccccaaggctgtccctccatcagtgcaaggacagtgacatcagtgggcagacaacctctgttatgtccacagccacctaggagtgccagtctagggttgctgacggacagaatcgcccattckctgttcatctctgccctgccccacccccagctcccaggcagtccgctagaggctgtagcaggaagaaagccggacatgaagataccaagggctcttgggcatgggtgggggcccatcacgcttcctttggaaggagcaaagttattgctgaggtcaccctgggacatggtccccgtggcccagtgtgaggaggaggtttggtctgctcaagcaagacctcagggcagctgtggtccctgccttagacccagccacgttgccctggcaccttagggctgagctggagggcactgggctgggactcggccaggccaggccctgtggggccctcagagaaagagggtggaggtccctgagagacacrcactggagccaggaggacagtggtcagtcccctacctcctgcactgaaggtgtcattaaccatggcaagtgtgcaaatgaagcctgtgagggtggcctggagtgctccaagcagccttttcctcccgaccccaggggccatgagctctctttgttgttgtttgtttgttttttggagtctcactctgttgcccagcctgaatacagtggctcaatctcggctcactgcaacccctgcctcctgggttcaagtaattatcctgccttagcctcccgagtagctgggattacaggcatgcaccaccacacctggctaatttttgtgtttttagtagagacaaggttttgctatgttggccaggctggtcttgaactcctgacctcaggtgacccgcccacctcagcctcccaaagtgctaggattgcaggcaggagccaccacgcctgcccatcactcttccttcacatgatggtgtgtggtgccatggcggagccctgccttgacctcctttgccctccctaaccggacaggtagtgcaggctgcccgggcttagattcctcaaaattcccgaacatcttctccctcagcacaacaagcagagaacaagaacaggattggaagtgtctgttctgaagcaggtgtattcaagcactcaagsctgcgtgttttcctgggatgaccacatatgtgcatagccacatgcacacacacagccccgcccccagagctgagcagcagctttgctttgttcctttggaattttcatctctgggaacaaacaataataataaaatgcccagccacccaaaaattctgtttggaagaaaggttcacggaggagcaggaagcctgccccagagcacgtggctcctctggtgagaccctgggagtggaggcagctgtggggctgacatcgggctctcctctctctttgcaggtggaaatcagccccctggagaatgccatygagaccatgcagctgacgaacgacaagatcaacagcatggtgcagcagcacctggatgaccccagcctgcccatcaacccgctctccatgctcctgaacggcatygtggacccagctgtcatggggggcttcgcaaactaygaaaaggtacgggacccaccagcttgctctgggcaagcagtcctgcccggggacagactgaaaattcccgagagtccccaaagcccagaaacgcccctggtctcattgagcaatctcagcagtggcccagccaaggccaggcagcagcagccagtggcggcccytgaagcctgcagcaaggtcaaggccggagtcccggcaaggctcccctgggcatccccagacagccaggaagcccccactgacccacccaggctgggcttatctgcacccaggcctccagtggcttttacaaggtctgggatcttacaggccaaaagataaagttagacaaaaacaccagaatatcaggactagggaggtagcgctttgacggtggagggggcccggccagctggtctccctggatcctagctctgtaggaatgggcagaagttgaaggacacagggtgtatcctagaccacccctgcctgtgtttgtaactgcagttcttttggaagaaggccacgcctgtgcacttacttacgcctgaggctgttttcctgatactgtaactggcgagttgagtagtggcagcattgagtagttgtgatagagacctgtatggtccacaacacctaaaatgtttaccatctggcctttcacaaaaaaagcttgttgacccctgatctagacagagcaaaaactgagacaaaaaggatactgcctgagagaaggctgcgaggagatgattacccacccttgcacaaagaagtttgttgccttcargtgtaggtcaggcctgggcaggtgcaggggctaggcaggaggcatgggcgtgtgagtagctgggagggctgtattcactgccacccagcaggaccaagccaccaggtcagctgtggccttcctggaccccaagaactggggttgctgctgtagacagccctgttagctccacttacagtgtttgaccttgtgggacattttgtcctgggtgctgcgaagggtgtgaccctgagtctgcagtgagcttcgtgtggatctgttttatgcacagctctattctcagggcctggcacacagtaagtgtgcaaaaacctgtgtttgctgagcaggtgcactgagcaactctccttgtctccaccaggccttctttacagaccggtacctgcaggagcaccctgaggcccatgaaaagatcgagaagctcaaggacctgattgcttggcaggtaaagtgtccagcaagagtcctgcatggctggagggaaggaaagctaggagggtctaggctcagcacacacaccagccagcatggaggtccctgggctgcagtcctgatgcacgtggctgtgattgtccctgggtgaacccacccactgctgtcgtgatcaactcagctcctgggctgcagtcaggaatttgaacacccagaaaattatctcttgcaaatgaacaaggtctctttcctccccttggtcaattctgccggctgctggaaaactttttctctgtctgtattgatagaacattgaggtgagctcagagccatgaagccttgagctctagcctgtgccaggaaaggcgctcgggccagtgcagtccctgtgaaacgcatgtacgtcagaagctgcagtgcaccctctccctgttctccgtgcacctctggcggtggtgtgcgtcctcatctgtgttttcccagctgaagttgtgcaagttatttcactgttctacttatgctcctggggcctcgggagcctttcccagagggccagcatcttgaaagggcagaccctgggtgccttgggtttaagtgtcagaaccggacggatgcatctgtgcttctcagagccttcctgagcctggaagtgtaggggtcaagagccagtcctcacaagagcttggccggcaccagcctgctctgctgctttaggccactgcctctttaggcttccttttcacatgtgggaggcaaggagggtgctgtccccgagatcttgccacactgtgtaaagagagttgagggaggtgggggcaaaggcctgcatgggtttggaccaggtgtcgtagcccaggccactttgctaagctggggtcccaggctcccagtcaaggcccagagatgctgtgcagttgatctgcacccagtccagaacagggcaagatacaaaattagctgggcgtggtggtgcacgcctataatcccagctactcaggaggctgaggcaggagaatcgcttgaacccgggaggcggaggttgcagtgagctgagatcacgccactgcactccagcctgggtaacgagcaaaactgtctaaaaaacaaaaaaaaaaggaacagggcaaggctgttcctcttatgagacatcaccgtgagcagtttatttgtttgtttgtttgtttgtttgtttgttttggaggtgaagtctcgctctgttgcccagactggagtgcagtagcgtgacctcagcttactgcaacctcctcctccggggttcaagtgattctcctgccttagccttccaagtagctgggactgcaagtgtgcaccaccatgcccggctaatttttttgtacttgtaatggagatggggttttgccatgttggccaggctggtcttgaactcctgacctcaggtgatccgcccaccttggcctaagtgctgggattacaggcatgagccactgcaccaggccactgtgagcatttttattctgacatcccagcagggcctcttcttagtggcctctctgtcatcagcacattggccaatgagacgtcttagagtggagcaaggctgagctttggttgtgagccaaggtacgagtcctcttaaatttgtgtttagatatataggatgggttggatttttataattctaagtgcttatactgatatrtaaacataatatacattatgtatatattataaataattgtgataaaatatacataacataaaatttcccatcttaaacatttttaagtgtccagttcagaggcaataagtacattcacactgttgtacaaccagcaccgccaccatccatctccagagccttgtcatcttgcaaakctccaactctctacccattgaacgacttccccattcctccctccacccacctcctggtcaccaccattctactttgtgtctctatgaatttgcctactctagatagcttatatgagtggaatcatgtaatacttgtccttctgtgtctggcttgtttctcttagcagaatgtcttccagattcatccatgttgtagcgtgtgtcagaacttcattcctttttaaggctgagtaatactccattatagggctagaccgcaatgtgtttctccacggatctgtcaaggaacaacatgtgggttgtttctaccttttggctggtgtgaacaatgctgctgtgaatgtgggtgtataaatacctgctcaagtccctgctttcaatactcccatagtttggggtatatacccaaatttagaattgctggctcatgtggtattctgtgttttctttttcacraaactgccaaactcttctacggtcacagcaccatttgacattcccaccagcagtaatgcatgattccaacttctctgcacccccaacaagacttgttattttgtttgtctttttttttttttttttttttttttttgagatggagtctcgctctgtcaccagcctggagtgcagtggcgtgatcttggctcactgcaacctccacctcccgggttcaagcgattctcctgcctcggcctcccgagtagctgggactacagatgtgtgccaccacacctggctaatttttgtatttttggtagagatggggtttcaccatgttggccaggatggtctcgatttcttgacctcgtgatccgcccacctcagcctcccaaagtgctgggattacaggtgtgagccaccgtgcctggcctgtttatcttttaagtaatagccattttaatgagtgagaagttttatttatatgtatatataaacaaaaattatattaaaagggaagaaatcagactttgtcacaaatctgcatttgaaatctgtttgctttggaattatggttttgaacgtcctcagagtttgactgaaagggacattgttggccaactttggcttctttgyatggattgtaagcctcatgtagacagtctccctctgtaactaaaaaagtgggagagagtttaaaattgtgaatgattccattttagatgttgtagattttttactaaagggtacgaaattcaaaattcctctgcaggctataaaactattgctatacaaaaactagtttggtctgcaaaagttctattgattttttttttcctataagcttttacagcaaattggattttaagagtttcaagtcctacagaggaaaataatttgttccccagagagcagctttatgtcagcactatgtcatcattcctaataactatattaaaggatgaattttaaagcaggtcacaggaaaggtaaaagaatcagttttctagtaacttcattaaatcaaagagtgatgaaaaatgcatattccaaacattacctgtgattttgctttcatttgcaaatgtttggaaaacccgtatcttggtattggcaactgagtcatatgttcattaaaaataagaagtttgaatttatcagaatgctttgttctctttttgtttattagttcatctggtttggttttttcctgaaactatcagggcagagtgaggtttttctcctgggagtcccaggactcatgtgcagagttttcatcaccgatatataataagctcagctctgatgcataaaatggtttgtgaaggttggttaataagtcccaggcagctcctcctcagccctgcttgctgcctcagaaacagaggatgggctgacctgctcctcgctgggtgggaggtggcagtcagggtgcacactgtgtggtgcctcttgtaggtttgcggctggcaccaggtcatgagtcactttctcaaaggcacaattccatctttctccatacacagctgtcattgtggagcatccctgccgagtatccaaagacaaatccatacagtctcatattaaactgctgtgatgtatacatatttctcttttgaaatgtacgaagatgaaaggctgaactcagccatcatccccagctgatgacaagcatgactgttgtgtccaggggtggtgctcctggagcattaagcaaggcttccagatgttctgtgctgctttcagggcatgaatctgtgcagggkacagacaggagcaaacttcaaatacggcccatcaggagggcgtctttgtagagcaggctgcaggctcgctttgattaattagaggtgtgacttagggaaagtcctctcccatctctgggctctgagaaactctttaggaatgcagattcctgggatctgcctacagcaaatcagggctctggaggtggggttcaggaatccacctgagattctgatgcttagccagagtggaacccactcaactacagggtctccagagaccatttcagaccctcggtctatgttaagtgctttttgtgcattggaatgtgtttactcagggcatcctcttatcttctttcatttagaatcacacctgcagttcagccccaagtagacatataacagggaaccagttcctgtcctatcagaaggttatttcccatcaacgtcaggaactgctgagagtggtgaattctcacacctggtaaatttcacctatcagattgcagttcgagcagcacaagcgtcctaaaccaaaaggtcttaactctcatctgacaagtaccttctttgacagaaagaatctgaccattaagagttttatcacaccaccatcaacaccaacaacagcaaaactcaggaactagattacattttgtagtttgagaaaggcccgccctaaatcagaaatgcttttagtatctagggtggctgtgctttcaccttgcaacagcacctccacacatccctgcctttgcatccagagagagacmcaacacattcgacatcccaccaaaagttgtcccggtctgtctgcgtcrtcccccaaggcggaactcaggaggcagaaggctgacagtgagcattttctactgctggccctgagtaaaccgcggctagccccggggaagctgccatctgcacgagtaattcatagggaatattaaaacatcccaagtattttgaaatctctctgtatgctgtcctttcggtgataactggccagaaaggcctgacatgtgcctagggtttggggccaactgtcagcaaaacaaacttttgtgtcggtgcagcctccaagcaggctaggagggctatgagcgaggagagcgctgctactccctcctttcctggagcaccaagagaggcaacagctgtgtgctataaatggtaaccaaatacatttgatgcgttgattcatcttgataagatttcttgaatttgctcacatgaaattcaattgtgtacttattatcgttcatactaataaatctgctcatttagattggtgttctgtcctattaggaaaatctgtttttaatcagtattttgatttaattataaattattgagaggaagcctcttagcttgattacatggaagaatgtctaactgagtccaagccctggggggaagcagagaccagggacagaaagggagacttttccttctcccaccccacaacagcagcaactctggtgggtctctgcagctgggagaatgaaaatgtctctcttagaacgtttttaaaggtcagcttcatctccactctcggaagtgaagtgttggcatggatattttgtgacagcagtgtcgcagagaagcgattatttttagttttaaagaagaataaatttggttttcacttccaaaaaaggaagatttttcaggactatagatcacatgtaattaccttttggaatagggttctcgtaaaggcaatattcttagctaaaaaatgttcgcactctgacatgaccctttgctaatagaacaagttacatctaaacaaattcaaggtgtagctcttcccaaactcaagtgaaaagcacagataagtctattctgggaaattaactgagtagccgtggtgtagggcgcaccacactggacatagtcaattcagaacacaaatggttttcatgtaaacattttggtctttggtggtaatatgcctgctggtaaattgaatcagctggtttgatttggaaaccaaagcagatcgttttgccagttcccctttccccaagtgtgcattgctcgtcctagaccattatccaagaaataaggaatgtcaacctctctgttttccagattccttttctggccgaagggatcagaatccatggagacaaagtcacggaggcactgaggccgttccacgagaggatggaggcctgtttcaaacagctgaaggaaaaggtggagaaagagtacggcgtccgaatcatggtaagagggtagtatgcgtagtgttgcagaagagtgggtgtctgggcatcccactgttgaacagggacragcttccagagcagaggaactcacatgtacacatggtgcccgcttaggaagtgggatgtgagggagctcagcccccttgggcagtcttgtctaccggcaactcagcaacctcctttcaataactggaaatgtcagggcgaataaacattcatgaatttccttgattaccaaatgccccctcacctgctgtgaacacagtccaaccttattgttgcagagcaatggagaaatctcacagcgcccaggcaactcagctggttgacagtgcacacctacagtcatacaatacacacagagggttcggtcatccacagggcaacagcactcacgacggcccatggcagaggtagcccagcccaaggttgacatcagaggatcatggccatcgaggaagaagtgaccaacatctggagtgtgaaattattagtgaagatttacctattgtaggaaggggtaattgatctagaccaaggaagataagccagatgtggtcaggggaggagatcaagaagacactgcctggggaaaggactccctcaacagaggctgagaggcaggagtttgaatggcaggccaggggccagtgcagacacaggcatgctttgggcagaagagaaaattcagagcggagatggaaaggcacccaacctccaagaacaagggatgctaggctggggcaggaggctctgctcgggatgaagggcagaactgagcttttgcaatgagtttatggaaggtttctgagcaaaggctggcatcaggagcagggtggagagcagcttgagttttaatgatgcaaaaaccttgcagttcaaatcttacagcccacttgagactgtccccaggagccatgccttagcagatgtgggagcaaagccaggcaccgtgagtcacagtgctgccctgctttgcagctcagagtggtgctcccatctttactcagtctctgggagctttgctgggcctaccctgcctgctcgggaactgtggagacaccagacacggcaaagggtccccactccccattgttcagggatgaggggcaatgtggcacagagaagcagggagctctcttctgtctactggaattccatgcctgccggcactgagggggtgtgcacagggcttcaactccccggcaaaaggaaggcgagctgtgggaagtcgcgctgcttctcccaggtaacatacggcactttcctctgctccttgaagaccaggtgtcgagtggggtgtgccattttggtttttttctgggcccagggccgcctgtccaccagtccctgaagttctcagctattctctattgaaccctgttttctttgacacattgatctcaataagcaaacagtaatttagtgctccccacrtgccagggaccttcctaagtgctgtatagatactcagttgcttaatctgcctcacactctgtgaagcaggcactgcagtcayctgcattttacagtcaaggaaacagggacatgggaaggtaagtaggtcacaccctagcacgtggcagacccatggttcaagccctatccatgtacctccagggtctgtgcttttagcccctactccaggggctracatttggcaccacagagcttctccgcctctttcccacatggtaggaaatgcatatgagacctgggcaacccctgagagaaggtaatttggttatgatcacactgcatgctctcccagtctccccgcctctgccgggcatgaccgaaccttggtgcctccaagcctaggacctggtgtccctcagatgagagggtcccaggcccagcagggcttgaacccaacaaagccaacataacacaactgctgctctgaggttgaaaactcagcaggtgggagtctggaactgccagcccagcgggagctgctgcaggtgaacaggcctggaaatcagggctctgtccttcaaggctgggctggaggatcctttgtgcaagtcagaatgctagagtagcgcttgatagcttcagagcctgcaactcattacagtcagagctgagtggcaagaagcgtttcggagtgcgtcacatcgcatctctttcaaagttgatgcctgtattaattcattctaagaaacaaacacttgtgaaatcttgacattttcttcctaagtgaaaagcttcctcttttctcagtcatttaatgtatatttcaaaatcacagaaagctgtctggctcaccagacatcctgcatattcccttctctgccacattcatgagttctgagtgtgcttgctttgggcacaggtggagaaagcaagggcaggaaggtagggtgctgtggattggtgtgctgtgtggattggggtgccgtgtgaattggggtgccgtgtgaattggagtgccttgtggattggggtgccgtgtggattggggtgtcatgtggattggggtgtcgtgtggattggggtgccatgtcgattgtgccatgtggattgtggtgttgtgtggattggggtgccatgtggattgtggtgttgtgtggattgggctgccatgtggattgtgccatgtggattggggtgtcatgtggattggagtgccgtgtggattggggtgccgtgtggattggggtaccgtgtggattgtggtgctgtgtggactgtgtcatgtggattgtggtgtcctgtggattggggtgctgtgtggattggggtaccgtgtggactgtggtgctgtgtggactgtgtcatgtggattggggtgccgtgtggattggggtaccgtgtggattgtgccgtgtggattgggktgtcgtgtggattggggtgccatgtggattggggtaccgtgtggattgagccgtgtggattggggtaccgtgtggattgtgccgtgtggattggggtgctgtgtggattcgggtaccatgtggattggggtgccgtgtggattgggatgccgtgtggattggggtgccgtgtggattggggtgtcatgtggattggggtgctgtgtggattggggtaccatgtggattggggtgccgtgtggattgggatgctgtgtgtccttggttggagcttatttccagcacattgtgaggcagcaccgtctccatcaacctccccacccttctctgtagcaccagctgggtcaccccgtctagggggtgggagrcttttacagaatgaaggttgcattttccaccctgagatactttgttccccggacccaccttgcagagtcctgctccatcctttgaccgcaacagcaggctctgcaagcatcctttgagagtcaaggggactggcaggtccccttgtccttccctgagaaatgtggcaataaaacgcagtctgggatgtgcctttcctgtcttacctactttggaaacttgcaatcatctcagagcactttgaaaagcaatctagtatcaccctgtttgcaaaaaagatggattttaaaatttaaaaataaacccatagaaaggacataaaccattttgtcagtgtttctgagccagcttaagccatagaaagagaagatgtggacgccctctgacttctcgatacccaggcccctctgccactctgccttggctttcatcgtgttcccagtcctggggctccaaggagctgccattccctggatgggagctctgcagcccagcttctcctgacctttagggagcgaggtgtgcagggccccagggatgagcccrtgagcacctgccacgttcggcattggcccccgtgccctcaccggcccacagcgccacgttcggcattggcccccgtgccctcaccrgcccacagcgtgcaggaggcatgtgtgttggccttcaggcttgtgaaaaagagctttaggtttctcaccaaaacttcatctacctcttcaagtccgattaggagcagggaaattgatcctggttctgcattctctctactcccatccacytcatcactccaaacaccatggagagccataaccccaagatgccatcgtccccctctcccctccccacctacagtcacaacacccgctggccacccagacccgggagagaaccaggagtcacccttcctccctcaagttagttctagctgtggtatcccctggtggtgctggggttcaccccaccatctttgccatcacagttggcccctgacctggcccccagcttccaggatttctcctctctcgccctccctccacagctgccggggggacccatcccagtagttctcttaactgggatccatgagaccctggggttcctcagaggctgttgggaggggtgttgactgggaggtggagctgatagcccctgcctcagcaggaacatttagcttcacctattccttgtgctggagttccatggtgaggagaagcagtgtggcatggcctacaagaacagccagggaccagggttctgtttcagatgcagagctgatggtgcagttgtgtccttcagtcttgtggcctctgagggccggccaaggttctaacatcacactcgcaccctccctgctgggcctgcccatcttctgccccaccccccagcccctcctcccccacctgctctctccaaaggaaaatgtgtcaccctctgtggatttccaggctgtagctggcatttgtatagcatctggaaagggacattccagatcacgatgaagtgtgcctgcttcttacccttccttgtacagcactggtccctgtgattaagttcagccaaccccttcaacccagcccattcccatccaagactctgggcagtaaacacctgtggctggctcaaggtgggacgttacagctcagccgggagacagcgacgtaaaactcagggtcattaggcagggccagaggatcgctcctggtcagaaaactggaatgagtgtttgctcaggcggtgaagacagcagcagccatcagggtaaggagccctgtgggcttccccggcatcatttcatttagttctaatgctggccctctgggcagggaagactgctccctgtgtgctcaggaggaagctggggctccgagtggctcggggttttatggagggtcacaccatcagtgccagggccacaattccagcctagttccaatgtccccaactcctacccaccagccctactttcagtcacagtgtctggccgtggagtcccacctcccaggactggttgagaccctaattgcatcagatgaaacaaaagtaaagccctgatgtcttgatttctagaggctcaatcaagaaggaattatgcggcagaccgcccagtaaacccatggtcgcacccagggagtgccctctgtctctccttgacgggagtcatcctcctgccaacccccttcctttattccttgaaatccatactcacacatctcaaccaagacctgaggtcaccttctgagattatgtatggggtaaggttttcacagttggggataatccccaagcaaccatttcccttttagtttcttctaaaggcagagtaattacagtgaacatctccatgaagctatcccctggcaccatcattggtgcaggtccaagactgaccarcccctctctgctggcaaatcccagctgcacgtcactcaragccagtggtcagcaaactgtggcccctggcgtggttgtgtaaataaagttttgttgacaggcaggccatgctcattcatttctgtattatctgtggctgcttttgtgctgtygtggcagcgcgtgctagtttccacagagaccatatgtcctgcaagcctaaaatacttacctggtcctttgcagcagaggtcccagccctcaggcagtggactggtatcagtctgtggcccgttaggaactgggcccacagctggaggtgagcggcgggtgagggagcattactgtctgagctctgcctcctatcagatcagtggcagcattagattctcatgggagcatgaactcgattgtaaactgtgcatgtgagggatctgggttgtgcactccttatgagaatctaatgcctgatgatctgaggtgcaacagtttcatcctgaaaccatctcctgctggtctgtggaaaaattgtattccacgataccggttcctggtgccaaaaaggttggggacaactgctttacagaaaatgtgggccaattcctgcccttttacaattttgagcttcttattatgaaagagatagtttacacatcaaatgctgttttatttgggatcacatatttaagaaaaaggcccacttttcagaaggggaagtggcgttatattaatcttacctgtaatctaccgcttctggccttggagggctggaaccatggtccacagcaggtcttctgtagttgattggctgaatgagatgggcggggtggggttgcagggtggggaagtcaacgccacacagagaggaagtgccctacaggaacttagtttccacatcctcaggttaaaggaaggtccttgtgcagcagctgcagtcccagatgtgccaacatctggctcggggtgcaggtaccctggaattttctagctaatgagatgtggacacatgctgtatttcaaggacacttgcttctgtaatatgtcaagaaraagatggaaaagtccatctagagatcttttttttgtttgtttttggcacaatgcatcactagttcactacctagcaagtgggagaagctttagcaacttcagcagcggtttcacctactcagtggcttcagtcacttgcagaaaggaaacgtactcttcattaagcagcaggagcatgttatttttgtctagaggaggtcagtcattatggattcatgcattttgatggcccgtgtagtctgtcaacctgcagagatacacaaaatgcatctaaagatcgaaagactctttaatcactctctaggtgttactctacattaaactttctggtcggcacattctcctgtggctttggaatgtgttgacgcatcgcggtctttgaagaaaacttgcactgtgtattaaaaggctaagaaggttccttctgatactttcacagtattgggttaggttttaaaagactcaaaaataatcattgtttttgtcttccactcagaacaagaacatgtactgtttacagaagtctgaacgatgatggtctcgattccacacagctaaggccactttatctcaggagtctgaccatggcaggcacaggcatcaaacaagtctccttctctctctttctcgctctcagccctcaagtctggatgatagaagaggcagccgcccccggtccatggtgcggtccttcacratgccttcctcatcccgccctctgtctgtggcctctgtctcttccctctcatcggacagcaccccttccagaccaggctccgacgggtgagtcaagctcacagcagggctgagctgagcagtgagggcttgggggatctggaaggagccacccagggctctgggtttattttcttacaactgaggattttgtgttcatcaaaattatctttgaaactgagaccctccgagactttctgaccgtagtgcccaatattactttgaggtcgtgtgagttgttgagaaaaacatcctctctttgggtaccactttgggtraggttttcatccaatttagaacctccagtgagtgttcagtcctcttcagcatggcttagaacaagcttgtccacccgcggcccacgggccacatgcagcccaggatggctttgaatgtggcccaacaccaatccataaactccttaaaacagtatgagattgtttttgtgatttcttctttttttttttttaatagctcatcagctattgttagtgttagtgtatttcatgtgtggcccaagacaattcttcttcttctaatgtggctcagggaagccaaaagattgggcacccctgggaaaaagcaaggtgcagtccgggctggccaagcrctttgtacttttcatctcctgttcacctccagggtgttgtgcccggacaggagctggtgtggtctgaccatgacacaacctccactgtccccctgtgacaccattctgccaagccaactgtcacagagtcaggctttcatgatggatggccgggccttcttttttttttttcttttcctcccttcctcatttttttggagagcaaatgttttgtttatttttgtttctgctgaggtttattgccttttaaagggaaatggtgtttaagtgaatgcttctgagaatgaccatctgtccctactttttaggacaactctggaaaataaaaggcatattatcctttttaaaaaattttgtttttgaggcagactctcactctgccacccaggctggaatgcagtggtgtgatcacagctcactgcagcctccacttcccaagctcaagcgatcataaccatttgtaagtgaacagttcggtggcattgcgtacgttcacatcgctgtgcagccatgaccaccatccacctccagaactctttaatattgccaaactgaaactctgtacccatttaacaacaattccccactctttacctcccatattgattaaacactaactttgcattctttccccccacccctgacaccctgacaatgtctactttctttttttttttttttgagacggagtctccctctgtcgcccaggctgagtgcagtggcacgatctcggctcactgcaacctccgcctcccaggttcaaacaattcttttgcctcagcctcccaagtagctgggcctacaggcacatgccaccatgcctggccaattctttgtatatttagtagagacggggtttcaccatattagccaggatggtctcgatctcctgacctcatgatccgcccgcctcggcctcccaaaatgctgggattacaggtgtgagccaccgcgcctggccaacgtccactttctatcactatgattttgactattctaaatactcatgggccaccttctttgtacaaggccactttggagatgcatttttgctcttgagtacccaatagttaacatttattgagcacacactgtggctctggcattagctcaggttattgcaaagagaactgcaacattggtatttttttgtatttttgagcggcaagcatgtaaagtttgttcttctacaaaaagaaaaaaatgttgcatgcaatttaaacaacacagaagaacctctaattgttttactgctgatttgtacagttgtttgtgtgtccaatcccattttgtttacaatccatcaccctatcaaacccacaggcatctggccccctcaacacacagaaacaaacttccagagagccccaagggacggctcaactcggattgccctttgttgccaacgactgatgtgcccgatggagaattgcaaactatccccatattttttcttaacagtaatttttatcagcgtctgatatttataaggccaagtccatatggaaattctcaatttagaggtatttaaatcatgtgtgcttgtcacttacagcaagatkgctaaagaaatttaattcaacttctccccgagaaaatccccggactggttatggaaaggtttttatatttctaggaacataggggttagggtggaaattaatggagaggttttagacagaagagtggtgaattgcacatgtgagctcgggctgctggctcttccccagaaggcatttgtttaacctttaactggaaggcgtctttattacagtccagatttgtgttcattcttggggttaccaccctttgctagctaactaatgtggagaaaatgaggctttggtctcaaatggcacaggttacatgcagaataaagttcatcctgtaggcagttgcttctcgtaatatgaaaatttaaaactccacctgcctttctctgggttctttgtatacgcatcaggatttcacaacccgggtcttctccctgagctaaacagcatctactaatccttttcttacctacattatctcaagttctgctaaacctagaataaaatcatgaaatgtttggttgttgcttataatagataaaatatttctcacctaatggatatggatgtattgtatatccagtgcgaaaagtccagatgtcccaaaatgccttaatgatctaagtcaatattggtatattttatcaatcagtttaaattttttaagcattttagtatagaaaaatgtcaaagctgagtacagtggctcatgcckaaaatcccagcactttgggaggctgaggcaggtggattgcttgagctctggagttcaagaccagcctaggcaacataacraaaccccatctctacaaaaaaatataaaaattagctgggtgtggtggtgcatgcctgtagtctcagctacctgggaggctgaggtgggaggatcacctgaacctggagaggttgtggctgtagtgagccatgattgaaccactgcactccagcctgggcaacagagtgagactctgtttcagaaaaaaagaaacatttcagatatgtacaaagtgggccaaacagtgtaatgaggcccccatgccccatcatgcagtcttgacaattatcagcttttaactaatctttttttttcaatctgtatcaatcatattttccagcaaatctcaaatatcatattttatctatagctatttcactatgaatttctaatttaaactcttttttaaaaccataactcggttatattatataaactatagtaatatagtttatttcacaccaaaaatattgacaggaattccatattataataatacatgagtgttaatttcccattgtcatgtctttttttttagttggaggcaaaatccaaataaggttcccaccttgtaccttgcacttggttgatattatctctttaagtctcttttagtccccttttctcccttgtaatttatttgtgggaaatcctaggttgtgtatcctgtcatggtccccaccatcaggactctgctgatagcgtgccctatcgcattgtttaattcgcgtctcgattctccatattccctgcatattggtggttgaatctagcgatttgatcagattcagatttgatttagggacaagatgacttcataggtacttgtgtgttcttccattcagaggcacatcataacctgttctctctcttatggagatgttaacagctattgataatcagtgcttagattcaataccattattgtttacatagtgacctgcagcagatcctactgcacagccatattagatgagagaagcaaagaataggtggtggtccttgctctgggtagtctgcatcttcagcagatttaagcgcagttttgcaaatgatccttcccttcctggttcatcttactccccattatgggacacgcaacatggaaataatcaacagtgagcaaatcaatggggagcaagattgctgcaatgaccatctttttttttttgagacaggatctggctctgtcacccaggctgtgcaatggcacagtcttggctcactgcaatttctacctcccaggctcaagccatcctgccacctcagcctcctgagtagctgggactataggtgcacaccaccatgcccagctaatttttgtacgttttatcgagactggatcttgccatgttggccaggctggtctcgaactcctgagctcaaatgatccacctgccttagcctccccaagtgctaggattataggcatgagccaccatgcccggccctgcaatggccttcttaatgagaacagtggctttcttccaagtgtcccattcagaaatacatgtaaragaaactagagctaggatgaaaatatgactggctggctaaattatcttctcttgaaatcatgctccccttgaagaagccaattgcttctccaggcggtcaaggaagtcaggtttggaagttgctgtgaggctcagagctccaaagagcaggctgtattttgaaaatgtaagatcctagtaacagcactgccttccacgtgagttatgctatatggtttttcaggcgggcccatgccttcatccattcaaccatctctcctgactcctcctcacagcaggagctgctagggatgagactccagtcttagagttggatccatttcttccacctcctgataggacttctaggaccagaaacaggatggacatgccaatcttgtgttggagtgacaaatcacaatcrtgtgtggatatgcttgcacactaaccttttggtacatgccttagacactagcctaagattcatttactccatggtataaccacgaatgtgtctttacagcaactgtggggtaggcagaagggtggtggtgtctttatacccttttataagtgagacagctgccagaggttacgaggacatcaagagtcacccacagtggcagacctagaatgcaggtcttctgtctccagcttagttgctggctggaaacctcagggcatctccaagcacctgtgagctggccctggcttgcttctgactgagccatgcaaagtgctttcacctgaaaacaaccgtctatctgtaatcatagagccttggtcaggatcaaggtagcagacatttctttgcattgacgtctatttttccccattaaaaaatagacaaaatatttctatataaatctctaaaagacgagggttccccttttgaaatatgccctaaataccatcctcccatcgtaaatgaacaattccttaatatcatcatcaaatatccggtcagacttcacatttgccctatcgtgctaagtgttctatctttttccagtttatctgtgttgggattgaaacacagtccttgcatctggtgactgtgtatctgaagtcacccttggcctcccttttaaatcactgctttcattgtaaatgtcttcratggattgtgagtgactttacacgtgtctgtgggctggaaagcaattgctctcctattaagacgtcattgacctttcctttaggtttgccctggagcctctcctgccaaagaaaatgcactccaggtcccaggacaagctggacaaggatgacctggagaaggagaagaaggacaaraaraarraaaaaaggaacagcaaacatcaagagatatttgagaaagaatttaaacccaccgacatttccctgcagcagtctgaggctgtgatcctttcggaaayggtaacccgacagggtatctttcctcgctctgcggtagcttcagggacctacctttgccccacctgtagccaacagggctgacrgtgggctyttattgaacttgttataaattagcaactcagaaacctggggtcctcctcccctaacctcaaatgtcccaaggcagtaggacagccagagccacagagagacctggaggaaggtgggcttagcatttgtcccccttccgcagggcctggggcgaggccgctctgctgctaggctctgccgctctgttggacttgtttcctacacatgtcctaatatcccagaagatgagcaggagtccttttgttgtcaggaaacagtcctyggtgtccgctaatgccttccccttgccccttgctgactggaactcttctaagctagttacggcccaagtgttaaaatcagcggaactagaatccaaagacctcttcccaccgggccccagaagctggacccagtcctggggtatcctgctctgtctcatctgctccacctttaaatctcctggccgtctttcacaaggacttaacagggacttcacrtgacccgtactgctgagctgaccttgaagacgggtcccagtgagtctcgttcattccacagtcgtgggcgtgtgagggcggtgaaacccaggagcmggctctcatcctggggctgggcctgagggctgatcctcccagaagtgcaccrcattgggaatctgtgttcgtctgttttgtgttactgcaaaggaataactgagcctgcgtcatttatgaagaggttgatttggctcatggttctgcaggctgtacgagcacagcactagcatctgcttggcttctggtgaggcctcaggaggcttttattcttggctgaaggcaggggaggggagcaggcgtgtcacatggtgagaaagagagtatgggtggggggtggggggtgtgttccaggctcttttaaataactaggtctcacatgaactgatagaatgaggacccactcattacccccattactgcaaggacagcaccaagcccttcacgagagatctgctcccaggacccagatgcctcccactggccgcacccccaacatttcaacatgagagttggagaggacagatatccgagctgtatcagagtctgagtgcgaagatgaggcacagcccacttccagggcgaacttgattccaaaagtgctagctgtagtkggaaacaaaaataaagaaggagttctcatgggctgtcagcatcaaaggtgaagtcaggattggagccgccctccctggaaatgggtgggtgtctgcttgtctcagccctgggcgtcggygggctgtgattagagggttagacatactgcactgcttgtttataacttaaaacccagaaggtacgttttatctatacttcatgccactcagaaagcagtcacatgctacctggctatctagaggtggaaggcaaacgccccagccatgacttgacgtccaacaggccagcgctgctctgcggcctgtgggtaggtgctgtggctgcagctgggctggagaattcccatgagggtggccgaggatgtcagaccaggggggcactggctggaggctggcctgaagtacccagacgctcagcgtccagcagattgaggggttcctgaccacacagcatgctctgtctgctattctggaaagttgagatgcccaccaccccagaggctggctgaagtctccatctcttaagccccaggtagatttctcaagtctcaaaacattrtagctgggtaggggaatgaacagaagcatttttgaatattacttagtgccagacactgtgcaagtctttcatacattttaatttaagctccgttttaagatgctaaattggagggcctcggagcagttgtgccaagtggcagaattgatcacagctgacttgtgtgaaaagaagtccaaggacacaagcacacacgtgacaggcacagagccagcacagtgcatcttctgtccctgcccttggtggcccaagcatccttctagggtccttgcaagcagcagggctaggggcagccccacgagggctgcctccccayggctggccctagcaccctcagcaaatccacaggaactcaccaaggtcagagcacagaaccttggcggtgcttctcagcatctggcccagtgtcagcttgaaccttccagcaccaggaggcggagaatccgaacctcccactgggggacaggcttactattcttggtccagcccagcaacctgtctgtctacgcagagggcacctcctccaggggacgggtgccggcaaggtctgtgaggacagtcagacacctgaagtttcctagcaggcggctgcgtgccagtgaccagccatgcgcaggaggggaggtgcgggggaggaggttcacaggaacagaagcagcaacccattccctggggacaacaccagccacccccccaccacccccactgtagtgtcctccttgcccttcccccctgcgggcctcccctgcaccccagcttctgcaaaggttttccctcctcacccctgtggctgggttcggtttcctacttgatttgcatcatcaacaatttcctgacctttagctgagcctctccagccagagcctccaggctgtgatttgcatctcagcagtccagcctcctcagctctctgagtcagaatgtgccctccctgggatgcagggaggccaggagaagcaccttaggagaccccaaatctctcttgccagcacattcaccttcagagagcccagcgcttcaccyggcctttcctgacttcccacagcagttttgctgcctggaacaaggccatttcttcagaggaggtgcagctcctgggcgcttggctcccccgacagcacaggacagttctggaaatagacctgttggcctggctctgtcactcatttaccagagggcctgaatcttcctcccaagcctagttcccatttcctccttccagcctcagtaacctccagactggccctggcacagctgactcctcctggggcagacattgaagcctatgtgctctgttgctcacccaaaccagcacagcgcatccaccaggcccccagacccagccgcagccccaagcccagagctgcccactcacctgcctgcccttccttgggggagaacgttgacccctcctttttggctgggttaatacgttttctaattactcctgcgtcagagtattttgtaactgctcctgttccccaaagcctgatgatctgagaccaacctgtaagaaatatgtaaatacaacttactgatggaacaaacagggaaagggcttaggtgggggaaagtcaagtgcctccaaaagccagagatgagcaggaaaaaatgcattgaaaaggagagaaaaagaatccctgcccagtaatgacctaggatgagagaagaagcaaaggaaaggaatagcaaaaatccttcagccaattcctagactttcaggtacacgccaaggagaccaaagcatgctgagcacagctgggaataattctgccatggaacaggccattgattttgttcttgaccgcacggatgttgccccgtgtgtccttgctggctatctgcrtgtcttgcaataatactcagccacttttgcatctatattcaggtcacctgcgatgtgctgtccagcccaggctgtgtgaggacagcagtgccagcccctcgtgtgggggaggtctgctgtaaccacatgctgggcggctccaaccccagaaactcattgtctcccagttctagaggcgtcggcagggctgattccttcagaggctgtgagggagagtctacacatgcctctctcctcctgtctgggggtttgctgccatctctggyrtttcttggctgatagaagcatcaccctgacctctgctttcatcttcacgttgtgccctcccaaatttggacacgtccatgtccagatttccctttttcataaggtcacctgtcctgttggaattggacctgttactgggaagtgtgcaggtccttggttcttagtcttcttagaggaaagaattcagccaagagaccaattagtaaagtaggtaaagtaggcttattaaggaaataaaagtagcatggactctgggagaggagcaggctgaccctgtggagagcagcccccaggagttctgtgttgtggtttttatattggactgttttaagctcccacctctgtcttaagcctctccctttgtctttgtctgttttccctgctctgtcttaagtctccaccttttccctgcctagttcctgcccaggtttgtggggctctcccttgctgctagttgatgtgcacacgtggggctcagtgatcagtaggaacctacctaatggcggcattgctcattaccgccaccccaagaaggtcatacagtggtcaaatctgtacatactgtgtgtgtgtatctcttaggcattcatcccttgccctgtttccctcctgatcagcatgtagctagttacattgtcacasgttagctacagagggagcaattactgggtgtcttatggggtgtttcaggatgctgcctcctgcctaggtattctcctcccctctgctcacacctagcatgtgtgttttggggggtctctggggcataaggttttccagagtttcctcccccggtcccccwttccttttcatgtcttactatctgcccactctaacaggcccaccctaagagccacaccttagcttgatcatttgcaaagaccctatttccagttaaggtcatattctaaggtaatgggggtcaggacttcaacataggaatttaggtggaaacgcaactcwgcccataacagaccgtaactgtgctctttctgtccttttgatgtagataagtcccctgcggccccagagaccraagagccaggtgatgaacgtcattggaagcgaaaggcgcttctyrgtgtccccctcgtcaccgtcctcccagcaaacaccccctccagttacaccaagrgccaagctcagcttcagcatgcagtcgagtaagtggaacrctccccacatacgaatcgtgctatagctccgtgacttcccctcactgaaggctctgaggttagaagcgcttcctccctccccttgcagcagaskgtgggagtttagataaacacctggctccctgggagtgtcccctgggacaggctgtagagtctggacttccgcaaatcaggccaaaatccagagcccaggtctccagcactggaggggcagaaagtgcagggtctgtcccagggtccatgtggaggggacctgtgargcacgtggaaccaccacactttctatcccaggacgcagagctgcaggaggccgtgggcctgcttgtgtctaggactgtgcrctggagaagcaccttcaggcagttggcaacagctaaggggcacagcttatttttctagttttgaccaatgtttaaattaccctagaagttcccacaaaactggtggctccaaacagcagaaatttgttctctgaaggttttggaggccaaaactctgaaatcaaggaggtrgcaagttggttccctctggtggctccaagggagagcctgtcccgggcctccctccagcttctggtggctcccagcagtccctagccctccttggcttgtggccacatcactcccctctctgcccctgtctccacgtggcctccttctcggtgtcctctcttcttacaaggacatcagtcattggatatagggtccactgcaaatccaggatgatctcaccttgagatccttcactaattacatctgcaaagacsctrcatccaaataaggtacattctgaggttctgggtggccctaagaggtctacattttggagagactctactcaacttactctaagtggcagacagcttttcaccactagattcagagccagcagagaggagaaatcttggcagggagaaggtgctgaggatggggacggcagcagaaccggggagcccactctccttcctgtggcacagagaggggtcccaggcaggaragctctgtgccctgtggcgagggctgtgcaaggcagtgagtgattgtcctctgctcctgattttcctcttgctgaaaggggagcagtcatgattctggagactgtcagtgggtggggaggctggctgcaggagtggatgcgtgagtctaattgagtaggcaaagagctttctgggcactggatatgtctttggagggtgcatcttcacatccttgcactattactacatgatctttctaaaamtgtgtttaaaatctattttaatattgaaaacagacaccatcactgctgctgcrgaaaacaatttagtggttcctccaaagttcaayrtagaataaacctataatatcaactggcagtcctgcttctaggcctgtactccaaagaattgaagacagggactcaaacagatacttaatattcatagcagtatttttcaagagccagtaagcaaacacaggccaaatgtccatcaactgatggccagattaacaaaatgtacgtccaaagaaatgtccgtgcaatggaatattacccagccgtagaaaggagtgaagttctgacacgtgctacagcacggacgaacctcagaaccatgatgctgagtgaaatagatcagtcacaaagggacaaatattatatgactccacctaaatcaaatatctaaggcaagttcatagagacagaaaggcatggctcacgcctgtcatcccagcactttgggagtycgaggtgggtggatcagctgaggtcaggagttcragaccagccagtcaacatggtaaaaccccgtctctactaaaaatacaataattagctgggtgtggtggtgcgtgcctataatctcagctactcagaaggctgaggcaggagaatcacttgaacctgggaggcggaggttgcagtgagctgagatcgcaccactgcactccagcctgggcgacacagygagactccatcccaaacaaaaagaaaagaaaaaaaaaaagaaagtagaatagaggatactaggggcgggagagaggagtggagagttactgtttaatgggtacagaattccgtttggggtgatggaaatgtttcagaaatacatcatggtgatggttatcccccacggtcgatgtgattaatgccaccaaattgtcccctaaaggatggctaaaatggcaaattttatgtcgtgtatatcttaccacaataatagcaaagaagtaggcagcaatcatgaggacagtcactcaccgaagccttcgtatttccctcagccccatggcagagcttccttataagcttacagtgtggccttcctagcatgcattttcctaataaaggatttttyatcagatgaatcctaggggaaaactccaaaagagactcatcagtaaaaatgtccatttttctctctttaatataaaagaaaacaaattatytttaagagtctcaacaaggtttgagaaaatatcctgccttaatgattattcctccgtttgaaaacggctattttttccagtttactttaaaaatcaattgtacttccccttggcttatttaaagcaacagccacagtgactgctatggctaatgacttcatgtcatacgactgtggattttcctgtggaaagagatgggaagctgggtggctggtcggcgtgttagactttgcttagtgaatctctccaggtgataactgcargggtgactgcaggggcctggctkggcttcgaaagcagtagcagcagcagcggagacggtcctgtggcacccagctgtttaacttccaccgaggcagggggcccgagcagggacagaagaggccggggtgaacatcaccctttctacagtggctcgatgccttgcttcacactccagttttartgttcgtgtgatacttgctattctctttctagaacattgccgttaggagagggtcccaccctttgtgttcgctccctccctgccctcatctgctctgttgacaaacgttttctgccagatgaagtgtttctgctgtgcctgcctctctgggagggaacgtggagcagctccctgagcattcaggctccgtggggaagtcggrctgattttaaatagatcccggttttccaggcttggagctgaacggcatgacggggrcggacgtggccgatgtcccaccccctctgcctctcaaaggcagcgtggcagattacgggaatttgatggaaaaccaggacttgctgggctcgccaacacctccacctccccctccacaccagagggtaagtcrgcaatctgaaacacaggctttcattgcttcgcctccacaaagtaggacgagtccctcattccagatactagcaggtttacttcgggctagtgagcacatgaggaraaccatgtatgatgggcccgggtttgattttgcaaaaagatatcraagcagtaaggactccagtgggtaagatctgtggctctgcgtcattatcaataactgcatcaaaaagcacattttgatatcatgcctcagaacgaggaagaggatagacattccaaggttgtcatcggttatcatcaccatggagatcattccactggagatgcaattctaatgacattttgatttttgagaagtagcttttctatcaagaggtctgactttttaaagaggttggccaatatcgccctgtatggcaggcacctgttgtacacctgcttggccctggagaagcttgtctccaaacatccctccaggcagyctcacctggtgctgggagctcctgggtggtgacaggcactcaccttacggagactgcagaggacagccaggtttggctcctgggcacagtcatcctcactgtgcccccacccctgggcaccctccccagtgctagttcgggggtgctgacctggcttcctccagcagcactggcctttgtaagcctaagcaacctgctggaacccctcttcagcgtgagtccctgaagctggtaccccccagcagctgttttagtcattcatgccacctaaagtgccttttgccaaacagcccctgggcctgcctgcccgtacaaatattagtcaaagtcatgaaaagccatttaaacaagcacctcagttaccagttgacagttctagaaacattcttttgagatccaccccgttcctctcctggttctcaaggatgctgtcaggcgtcactcatccctgcgggtcccagccccatcctcaygtcgggcccaggcatgtgtggagggcagcatgagtgggatggaggcgggcgagcgattgactcagccacggcgggaacttctgcttctaggctcaggcctccccaggccatgttattcacagcctttgacaattaaatcagtggtgtctgaagggtaaaatatccctcttcatatgtggacagctggccgtattttttttgctatccagccttagtgaagtaattatatggccgcaaaactcctgtagaacattgaaaacatgagattgttgggtggctctgtttttttcataatggtgagacatggtttttttttttwatttttctttaataaacaatataaatcccacgtgccatttctttttctttttttttaatggagactcgttgacggagtgttccacaaggtcattacatcccttatgagaggagtggaagagagagggtgtttgtgtacagcatacgtatttcatcattccctttgtatcagaaaactaaacaagcagtcatctttaatatcaaagaggcagattgctcttctgagacccaagtgccatttaaacaggctccctctccctagagacgcctcgatggggaaccggtcctggaggaggcaccaggttcccctgtgaagagggctttctggcaggctggaatggtttgttgcaccacagaaatggaagccggaccttccccggccatttctaactacttgtgaragyaaaaggagattcgggggggtctaacaagaatattgggttgcttggagtattgtttccctaacagcttcgttaattggtcacattytcwtctctctattttattgcaaaggcaggaatgttccccctagtctccctacactagtaaactgaaaattctaaacttagaattacagccaattcctctygttacaaatcaactccggggtaacattttattgtctcaatttcttggatacaccattgtgggttactgatgccacatacagttgattaagtaagggataacatggattagctctctctcaattgataaagggsgtgtgaattcaattagattaatgacccaggtgtctttggtctttgtttcttgtttaatttacttgcagcctgagtgcatgctcaggtgacacgctggtggttagtatgtcatcattaggcagaagcggttgcatttcctggggtgcctccctttgcacaggccctgagagctgttctaggataatgatcatccatctgccatgatgggggtgtgatcaatatcctcctgtcactctcattgatcagcctcaggcttgtaggcaactctgtctttagttgttgccactaagctgtcatttctttccaaatggctcttcctgtcagtaatctgagcttactgagtttatcaccattaatcattttgcttaatggtgataaacttttgacatgctcatacttggcatagaggtcatttgcagcgctgtgttggtatcaggctgtgttagtgtggtccttacctgctcctcattgggctatcagtgagtgtggctttcacatgtaaacaaacagtttcatcagacctcaaaatagatgtctcttttaacggttctaaccaaccttaaaaagacttaattgttgttttaccttccttaatataaggtcatatactcataggacatctttatatcagctttacttttccacatttattctcctctctgtgttaagcattaggtcatttttgtatttactagtctgtgaatcaggaggaaatctgggcgatgagtgagagactactgcgtcactgtctatccttgaaaacctcttttctcacattcagctaaatgcaaacccacactgagaggctgataaaaatccactcttacccttaagttagacaatagtgttctgtgatttcattctggttcttctgcctgtggcatgctcccacttaccctggtctgttcacttcttcattcatttgtttacttacctgttcatttcttcatttatccactgactcgtttattcactcattcatttattcactcattcatccatttttctattcgatcgacccatatttctagagagtctcctgcacatcaggtgtgtgtgatgggcatgagggtcccaaaagcaatagggtgcagctgccctcagtcataacactccagccaggtccatcagcaaggggtttgctattatcttcacattggaaattaatgttcttttttggaatctaaagtaatatatgcccatgagctgaagccagccagccagccacctgtttctgtgaatagttttcttggaacacagccacacccctttctgtacacactgtcaatgaccgcttttcggccacaccagtggcattgagtggctgcaacagagacsgtgtggcctgccaaaaagctggaaatatgtactgtctagccctttccaggagaagcttgctaacctttgcccgaagctcagaaagcaaaagaaggtctctcatctcacccctggagagtgcctctaaggacttatttatcccttagacaatagatggataacttggtcgatagcatctagatttaaaaaggccacgcaaagggcaatggtacctctcaggggctgtgcagamggtgggagagtgctcagaggcgtcagaaaggcccaggcccatagcagcccagtcttgagcctagtagacctgccagccccaagtcggacaggatggagcccaactcatgtggggaggatggttccggctgagtggctgtrccaggtcagaccccacctggagacggtgtcttttctgtcaggacatcagttatgtgacatcttccccatcctcatgttttttagcatctgccacctccactgcccagcaaaactccgcctcctccccctccaaagacaactcgcaagcagrcatcggtggactcygggatcgtgcagtgacrtcgcaagsctctctggaaagagtgtgctgcccctccccatctccatgccctctccttctgtgtcccctgagtctgctgtttacctcattgggcctgtgatgttaacatttcgtgckactgctttttcttcaaaggagttcagttctcaccatggagtgagtggcctttagcgtcatggagcaaggtgggtctgggaggtagatatgggtccgggatgtgcyatcgtagttaycagagttgggggcctctgagtgtgtctggctctgagagagtctgagtcttgcccaaacattctttctttttgtgccaaatgacttgcatttgcaaagagctcaattgctctgagctcagccaagtaggagaggctaggccatcactcttrggaagctgtgtagtgatgatgtataagaatcctcctcactgtcatgggatgttgtatccagcccctccttgttccagccggtggtgtgacttcgttggttgaggtgtgtctccaacctacatcagaccatgaagttcaacccctccagggaagctcctgatttcccctgcataattgaaaataggatatttctcagctattgaacagttactaatttatggggtggaaacagcattaagaatactgaatcaaatggaaaaacaaatgaatacaggaagataagtgttcgttcttttctgaaaaagagtatgtgtaccacaagagctggttttaattgggtgaattgtttttgtcctcattctgtacagaaatttgtatatatgatggttcttagaacttgttttaatttttgtggtccttctgtttattataataggcgtccaccaatgattatccatatgtgttcttaatttttaactgctggaagtgttaaaacacacacacacacacacacacacatttttttttysagaactccaaagtcctgaaaattttggtggacaatgatttttaaaaaactaactttgtataacctaatatttgtattctctcatctatatttttttattcactataatcatgatactcttctaatagacttaaaagttaatcattgacaacgaaaaataaaatgttattttaaaagactcacagtgtctgaccaattatgttttcatccttgattgtaaaatacagacgctgctgtttctattctgctatgttaaagtgcttggtgacacacatttatatatgcacctcttcctccaacattgtttttaatcctctctgttaattatgtctgatctggagcccagatgggaagtgcccgtgtcccgtgcatggctgcaygtcctgatagacaggagctaagcagagaccagctgagtgcttccccatcaccaaagccagagggctgtggggctgcagatcatgtgggcctcttttcagctgctaatttaagaaagggctttggttaatgggtgtgtgatttagctgtagaggtctggacatggagagctttctccagggcctatctggctggatctggggtggcaagaaacaaggaaggcagggggttctcttctcaatggacggggctctcacctctgctcctgccagacgtgtggaagccataaggatgtgccctctgcccatctaacccggcctagaaggaggctgctgtggagcccaggaagctgggaggctcttcctcctactcaggtgctgtccccagcgtattcatgcttgtaaatatccagtccacccccgagaaactgtaggcctgtgtgaatgtgggatttttttcttcaagaatctttactgtttcaactgttgcaccaagataaatattcatcttctgtcgagtgtgtgagaaactgaatattatccacaaccctagaaatcgtcgaatgggcacacccatgtaggcgaccacggagagcccagcctggggacaggttgtttttgggcagtctgtgcctcacattgtataagcggccaccagaaacggaaagaataggccgggcgcagtggctcacacctgtaatcccagcactttgggaggctgaggcgggcggatcagctgaggtcaggagttcaagaccagcctggccaacacggtgaaaccccatctctactaaaaatacaaaaattggccgggcatggtggcaagcgcctgccatccggtaggctgaggcaggagaattgtttgaacctgggaggcagaggttgcagtagctgagattgcaccattgcactccagcctgggcgacaagagcgagaaatctgtctccgtctctatctccatctataaaaataaaataaaagtatttatttttataaatataattgtatttataaaaaataaaaattataaaatttataaaatgatataaaatataattgtatttataaaaaaataaaaacacagaaagaatagtgcctggccctgtgataaatgatggttttcttgtggaatgacgtgtgggctcctgctcttcccccatctaccgggttaatcctcgcgctgcacaaccctggctggaatccccgccccacaaccccccaaggaccttatatccgtcggggatctctagagctgggaggtttgcagagaacacagaacagagttaaagaaaagtgaagacagccaaaaggttgcagacatttcctatttattaatatgaattacaaatatgctaatatattcaccagtgagtaaacttctcaaacgtttcatgcagatgcaacatttcctcagcttgtaaatccgtggatgggctgcaacacaataatcagagacaaaccggcctctgcacacagtgcctgctacatgcattccttctggaatgtggatccaggggaaggtttgcctctgtacatgcggggacatatcccttctacacagaaacactatttcttaacctttttttttttttttttcacaattacctttcaaggagcctttttagacatttttttccctccatcactcttatgatgaaattttaatagtacagccatactgtgtatcacttagactatatactgcatatctattatgtactttatgtatacctatgcttttttacattaaaaaaataagattttttgtttgtttgtttcccaagtaccagttttcagggggtgatactgcctttttgcagactcatgctccaaagcaggaattgtgagcttcttaggctctacttttgctctggtttccaggatgctcaaagccaaattttgccctcacacrttcagttaaattttcgttttattctcctgccttccaaaagctttctggactattaaaaatccatctttactttaactacctagtttcatatgcrctttcatcaaatctttattcaaagtagttagtatataaactgtattttataaatggaaaagtctttttcttacttgaaaaccacccttggtgctkgaagattgcttcctagtatttaaagaaattattttttaatcaattttaagattattctttcatgcaaagatttgatcgtttaaattycttacagatttcattatcttctgctctggattcttttatgttattggactttgtttcatgtccacagaactctttgttggtttaatggattttcatttttgctttttagttccatctctaattactttttaatattttacttaactttttaaagtctgtttgggaacttctgccaccacactttttggcaatctgccttttcagaattatttaaacatctactgtttcattgatgatggctcaaaaaaatagggaacctgtaggccaataagcctttgtacccaaacaagctagagttgtcctgccctatttgtctcccacacacgaggaaacctctgctcctccaggttgtacagtggcctgagtgcagtgtcactagctggagaggggagtgaggactccctggatgtctgatgtgtggcaaacctcctgggttagtttcagccccggacaaaagagttctgatgtggtcttaagtgtccacctggctggacggcagtagccagttaatcaaagcaactgtaagtgttgctgtgaacgtattttgtagatgtggttaacatctatcatcagttgaccttacataaaggaggtgacccttgataatgtgggtcagcctcatcccatgcgttgaagaggccttaagaacaaaaactagagtttcctggagaggaaggaattctgcctcaagaccgcagcatcagctcctgcctgacttcctagcctgctggcttgccctacaaattttggacttgccagcccctacaatggctgagccaattccttaaatctctctgtatacacacacacacacacacgctctgacaaaggacagaccatagcaaacctcctctcataaagtggtatttggcagaaacaggtgactttagggatacctggagtagaatccaagaatctagagacccccaagcaagccacttatcctctccagtcatgagtgtctctrtgggtcacgtcataatatctgctgccaccttgtcatggtgtcttgaggctggaacatccaagatggcgtccttcacgcgcctggcacactgcttcactgcagctggctgggcattctctcctctctctctctctctctctctctccctccctctccccctttctccttccatcccccttgggttgtccttcattttccagggctgtttcatctgtaggaagctactttgtatgctcagggtttccctgtttaaattccaaacagaatttcattttcctggtaaaccattgtgaggttgccaccgtgacctacccttcatctcagtttgccttggtcacrgctctgtggcttccccgtgttgcagcctctcatgctgagctcttgggtgagcctgtcctcgttcccctggcccttggcaggtggcttgggagctggtcctgaaccagcttctccaggccgcccacgcagctctgctggcctttccttttttgacgtgcttcatctgcaacatgagactccggaatttgccgtgcagactccagtggccatgctgccctcctgccactaggaagggctccatgcctttgtctagccccagagcactatctccttatctccttcctgtcctgtcactttgttcaactgttggcacccgggtttaagctgttgctactaactaatgtttcttttcactttggggaagtgcttaattccatctcttctttggcttctaaataccattctccaatcaaacaaaccaaggcttctttaagaaagatcatcctggctaacacggtgaaaccccgtctctattaaaaatacaaaaaattagctgggcgtggtggtgagcgcctgtagtcccagctacttgggaggccgaggcaggagaatggcgtgaacccggagggaggtggagcttgcagtgagctgagatcgtgccactgcactccagcctgggtgaaagagcgagactccatctcaaaaaaaaaaaaaaaaaaaaaaaagaaagaaaagaaatatggctgactctggtctgggaatacaagacagcctagaacattttgtaccagaatacaaggaagtgttcaagaaataagggccacacttcaaaaagacattggggcccatatgaagtggcttctatgtgatggcccacatctgggacaatttgagcatcaaaatcaatgatgacagtaacaaattttaaagcagttgaatgaagtaggccttttctgtaagtccatgctgatataaatcaataaatgaataaattgaatgtttaatgaagaacaggatatctacataatttcaaagtgtcttcccacaaaacactaattacaaagggaaaaacaatttcatagtggaaaagactggcagataccaccttaatcaagaaataaaagagaacatcatcagtgttgggacaaattaaaattacatgctccccccaccaccacagtactgatgctctgagaacacatcagctctgcaatattcctaccaaagatgcataatcagaatgaaatcacaagaaaacatcagccagacttaaatttggaggcattctatgaaactgacccttcatatatgattccattgacatgaaatgtccagaagaggcaacctcacagagctgggaagtagattagtgttggtcaggtgctgggacgaataactgctaacgggtacaggatttttccttcagatgatcaaaatggtctaaaatcagattatggtgatagtacccaactatatgacaaaactaaacaccattgaattgcaccctttaaaggggtgaagtttatgattattgaattaattatatcttaataaagctgttattttttttttaatggcctataatcttggaaagggtcaaggccatgaatgacctagtcctcactacaggtgactaaagagacacgacaagtaaacgcaacttgtaatttggagctggatgttctctacattggacgtattgggacaactggcaaaccttgaatggagtctgaggattggacgacggagatatctcagtgttcatttctttactgtgttggttgtactctggctatgtagaaggatgttatcatttaaagagaaggaacactgagccattggggatagtgcggtaccaggcagacaacttagttccaacttactctgagcggggtgggggagaatgacccatattgtacttgtgcagaacgccattccttttccacgctagaaatactttttttccgcagggaataatgatatcatttcacttgcttctctgacaaagccttcaggccatgcctacatgctggattttgcaaaaacagtttacaggcacagtgccactgtaacaggaggcggggactctagccagcagccacctctgtgctgctagaacaatcaaggctccacatggagcccaaaggagggaaaagtgagtccctatctcaggagcattgggcaggccacagtaagggaagtgtttacttgtctatactaaatgtttacagagtccctgccaagcccagcccggttcagacttggtaccgaggtgggcaggacaaacgtctccaaagttcctccgggagacgacaggcaatattcaaggaaccaagtaaggccattccacatgaccatta

SEQ ID NO: 6788 - DNA, 13340 bp, Homo sapiens
tttagtcaatcaggttttgcttccaaatgaatcattaaaaaatgtagttgctacagctatttgaatttcagaattgcagataaagaatagtggacctacagttatttatctgaccaacactgacagagtataaactagggtttatgatatatgtgacctaaaaagccaagcttgccctctcttgctaatttctgaaatattaacgatgtatctctcctgaaatttctatttaactgtgaggagttatggcacacttcctaatataaaaactcaatgctatttcttatttgtaaaaatttagaaagttagatatttatacttcatacacattaaaacaaattaatttttacaaagctttgggatacacctggacacataaaagcagaacatatcaccctttttgaaaatcatcagagttatacaaaaatcagtatgacaagactctaacgtctgaacaccaaataacaaatttaaaagtttcaagaaaatgctgctttcattattcaaaaagagtggaatgaaatattaccatgtatatcagttaacatacttttgcttccaaggcaaagaaaaaggaaccaaaacagacttaaaccttaagtaaatttactctcccaaaatgaaaactccataagagaaaaatccacagtagtatgtaggattcagaaaaagtttggtcagtcacattttttcctgctaccgtgtcaatactattaacctctctatgtcagctttgccttcaaattggtttaccttaaagtagaaaaatggctgcagcagttccagactcatacccacacaatgctatccttggaatccctccgactggatccatttatggcctgtaccaatcaatggagttctattctgtaagttagcttagaaaaatcatggcccatcctgtagtcaaaccacacaattggataaaagatagaatggatactggggaggggaaggtacacagtgccataagagaaacaaaaaatttacaattaagagtaaatagtaaggtcaggtgtaggtggcacacacctgtaatcccagcattttgggaggccaaggtgggaggctcacttgaggccaggagtccaagaccagcctgggcaacaaagtgagacctcatctctacaaaaaaaaatttaaaaattagttgggtatagtggcacatgcctgtagtcccagctattcaggaggtgaggtgggaggattgcctgagttgaggagttccaggcggcagtgagcaatgatcacaccactgcactccagcctgggtaacagagcaagaccctgtctcaaaaaagagtaaatagtaatagaaacttgagatggttagtatgaattaaaatattcaagtaacttatgacattcctttattattccataagcatttatggacacctaagtaaatgctaggtacggtactaaatatgtgaagatgacagaaaatgaattttagacttaaagacatttcttgtatataatttgaaattgtctaaaaataatatataaaatctataaatacaggaaaatagcctgtatgctttcaattacattgaaatatctagttaacatttttactttcacatgcaataatatccctatacgaagacgataaggtttcacatggtaaaatttctatagttcaattattctaatgaatgaaaacattccctatttaaaattactggaacttactgaattccctatttaaaattattggaaattattggaataccctatttaaaatatgtgccagaacatatagatgatgggtcaaaagatcatataaaacaacagcccctttaattttacacagaaacacaattaacaacatttactgggcgatcatcaccttcttttaaaactagctagtggtagtaactgcacgagtttatgtcccaccattggggcaatttcgtcattttcctatattcaagtctttatcagcaatagcaataacaaattcgagtgtgaaaaatagttggcatacttacatcagacatagaagtctttctacctaccaaaaaaaccaattttgctatagtaaacctatcaagatcgtattgaccaatgaagtaaaaatcattcattcattcatacattcaacattttgtaaacagaccagaaatcagcatttttaataatgatgcaagacaatataaatgtcagactgacataaagaaacatacaaggaaatgtaatgctaccaactaaataagaaacttaaatgagaaaactaagcagaaatgtgtagacccaaaaacaaaaaggggttttatttatatgcgaaatcataaatcactttaaatttcctaaacatgaatattattcatatttaagacagaagttttgcaaaataacatcagctgatacacatttcaacagtttaaactcttcattcccaggatatcccctaaatacaagcaaatttatgggtttggcctttaatacacagtatgattttttattgtccttttctctattgaaaaaaccagacatattttattaaatacttacactttagacagaactggcttgaaaacagaaatacaatcaacctaagcatcaaagaaaggtagatagatgggtgtatggatgaatggatggatagataagcaaataaataaatcactgagatcataaatggaagcgaagttaaacaagaggagagtaaattgatgtctgctatttaattaatattacaatattattcaaggagacaaatattatgcaacagtacttctcaactgccagttttccttaaactatcaattttctagaaaaattcctcaaaaagtagaacagcagtaatgtcaaaaatgtatcccaagacaaaactcagtaatggggctaaaaaagaaactcaaaatgaaaaaggttcacaatgtgctgtatatatttcaacttcttcaacaacttggtcctcctgcataaaaaaggcttagatattttgttagcaaagataattccaatacagataacccaaaaggttctcacgccatatttttaaaagttgacaaactatttgaaattatccaacataacctaatgaaaactctattaattaaacttattacttaaaagattagaaagtaatatcactataacccctggctgaaaaaataaaattttaatcttactttatttgtattaaattatatatgttcatattgtacaagaaatatgtttgctaccacggtgtggtaaaaaataatttaatcccaaagatatccatgtcctaatcccaggaacctgtaactgttacattacatggcaaaggagaattaaagtttacaaggaattatggttgttaatagatggcaagattatcctggattatgtcaattggcccaaagtaatcaacagggcacttagaagtgtaatggggaagcaggagagttagaaggagatgactagggaaaaacggtcagagagatacaacttggttggcttttaagatggaggaagggggccatgagccaaggaatgtggacagcttctaaaaactagaaaaggaaagaaaatggatctctcctagaataaacagtcttgccacactttgattttagcccagcaagatccaggtcttatttgtgatctccagaactacaaaataataagcgtataacatttaaaccaccaagattacgttaattaaacaattatagaaatttaattcacgtggcaattcctcatacataagacccaaaataagaataactgattatctttgagacacaatattccctcaactactttgaagttcttatcattatccttccaaatcatgtgccacaggtttgtggcacatgtcctgcctggtgtatccagccaggacttctagtagacttaacaggtttttaattatacatatttgtagctttaaaaaaaaaatcacaaactagcctattcaacattttccatatactttctttttacatatttatttatttatttagagacaggatctcactctgtcgcccaggctagagtgcagtggcataatcttggctcactgcagtctcaacctcactgagctcaggtgatcctcccacctcagccgccccagtagatggaaccacaggcattgtactactatgcccggctaatttctgtattttttgtagggacagggtttcgccatgttgcccaggctagtctcaaaactcctgcgctcaagtatcttcccatctcagtctcccaaagtgttgggtttacaggcgtgagccactgtgcctagcctaatttcatgtaacttaaaatctactctgcagtaatcaaagtcgaacaggaatattacattatgttaatgctaaactgttccaagtttcgtttaagaaatgtgaatgtaagaaaatctgggaataaatctaaaatggtagattctaggctaaaaaaactaaattaatattcaaattttcaaataaagacagattaaaaaaactcatcaagggttcacataggtatggttcaacatacatttttctttttttggtaaaatttagatatggtgaaacgcaaagatagtatcaattcaacgagttttgacaaatatatatatctgtgtaaccaacaatcaggataggaaacatttctatcacctgaagaaactcctattctttccagtcaatctctaccatccatagataatttattttttaatatccagcttaataccttactaacatatgcaaacttaactctttaatcacttaaattcccaactaagagagcaattaagttatttatatatacaaattttttttttccttttttacagatgagggggtctcacctatgttgcccaggctggactcttaataagtcctgggctctagcaatcctcttacctcagccttttacacaaacaaaaatagttactgaattgaactgccataatttttagaaccactaacatcaccaatactttttaaggaagattatacatttctatacgaaaataaccagccaaaaccttcaaaactacctctattttctgttagaaatacctatcagcaaaacacacctattttgcgatatcgagtcaatattaatacatgccgcattaaccatatcattgactacagtgaggaaaacccgagtttacaaaaacacactcagaaactattaaaataggtaggtaaaaaatattaggtagatacctgtacaaatattacaatgaatttggaattgtaagctttcatgcacacaaagggaaaaaaatttcctaaatttgaagttttcattgaaaaagtaaatggctcagggcattacaaataaatttcacagattacgtattcataaatcaacctttggaagtctagtccatgtcttgtctctactccgccccttaccttcaagctgtccctcagtgagaatgtacttggaacacaacagagcatattacagctcaatatcatgcacatacctacgctactcaaagaaagcactggcagcgtcacatgtaagaaaccaaaaaaaaaaaaagataatcaattctgcatggcatttaacattttaattgacaacatttttcgtcttatttaaaatcgtataaaacccagaaacagcttgactccaaagaactatacctttctaacaagaaaagcacattggggacagaaagagagattaccctccataccaaaatttttcacttttatcctttacggttagaaagccaagcatctattaaggagaggatgaatccgggcacagccaccaccacggcctctgcctctaaaacacataggaatccccggactgtgtgggaaggtctcttttcttttctccctccccttcagcaaccttacaggataagttttaagtctcgagctacagcactatgaagacttttccaagaaaagagataccagggaagctggccgcctgtcgccatgagtggtccgccccctacccccacctgcccgcgcggcgccggactcgcggctccgcctttcggggaggtctccgtggccgcccaggcgccacagcggggagccgcggtcgacccctccgggakgggggccagggcagcctccgcggctatcccgggagtcctgctccgacaccacctccacaggggaagccgctcggagagacgcagggacccaggcaagggatgcgggcaaacgcgccaagggttcrgcagaggggcgtgaccgccagttggccgggctgagcgaggcgccagagggaagcctgcaaggtacgtctgcgagagccgggtgcgggcgcggcaggggaaaaggggggcgctsrctctcttaccgccaggtccggattgcggctgtccctgtgtgacacggctcggatgacccccgctcgccagcttcgccagccgcgtccgctctcccagcgctccgaacgtgcctcgtcgccgaccgccacacacaggaaccgcttacccaccagctctgcccgcgtctctaccgccatagctgtcgctgccgaagcggccgctgcytcctccagtgcgagggaaccgatgaaacctcactcctaccggccgctcatgctgaggagagcggaccgggacacagcagcggacccgaaagagcgcagactcgggacgaaccggccgctctgccccggacacagcgacctcgggccctccccgcaaacactcctttggactcccagattcgcagccttgtgctgcagcgccacacaagaaaactgaaacaaaacccaacgcggccgtcgaagaccccgaggcagcccagccgccgccaccgcgccgcggccagtactgctccgtctccctccccgggcagcggcggcgcgcagcgcgtctccttccgccggcgcgggcggggcagcagccgcgggagggtcggcggaaccaccgcagacggaaagtagtgcccggccctgcggaggcggcagcggccactgggtccgtccagatccagaggcggcggcggcggcggcagcgggagacgaaaaaatgaagagggccgcgggaaagtaggcgacagctattcaaagcttttgggggtctacctttgtattcgttgctccctcagaggtggaggtgaggggaaagtgaagtgtagtggttccactctgatcacaaaataaactcctgggttgacgcctcacccgcggtttgatgttcagagcacacagcgcccgccgcctgagttagcctgaattagcagtcccgcagtaacagcagcagagcaggacaacacttctactgaaaastaagccccaaagtcacagcagaaccaaccgttcatgacttcaagggaaaacgagggggaaaatgtgatcctttcattcttctcatttgtggtgatactaattacatgtttaagctattcacagatttaaattcgtcactgctttattataagaacagcaaatgctccgtggcgggcccttgtcaacgtcctgaaatttcacaaaccgtgtctgcgacagtcttagtacttttagtactggtacacagctcaaacacactggtcagataataaaagcagagaaaatccccagattcagttattagaaaataccatggaaagaaaaggattttagccaatcacaattcaagaaaaaaaatatttatttcccatccaattacaatcggactccctaacccacacaaagatctctaacttggaacaatcactcttctttgatcaacttatttgttataaatcaaacctccctacaaatgtcagtgagcagttcgatttcaggcaccctttatactgcttttttataggtagtccaatattctaaatttcagtttcttgagattttcctgaacctctatttaaaaaaaaaaagttaacagagtttacagtagtaatctgaatgtttaaaataactataaggcttttatctgttttctctagaacactcaagctgggcaatttgaagtggagaaacacaaccactgctaataggttagaaaccaaaattataaggaagatggattttaataatcatggtcaaattttgccaaagaccaaacatagaactgtaataaataggctgggcacggtgcctcacgcctgtaatccctgcactttaggaggcagatcacctgaggtcgggagttcgagaccagcctggccaacatgatgaaactaaatgtatttttagtctctactaaaaatacaaaaaattagctgggcatggtggagcatgcctgtaatcccagctactcaggaggcagcaggagaatcacttgaacctgggagctggaggttgcagtgagccgggatcgtgccactgcactccaacctggtcaacaagagcaaaactcagtccccccgaaaacaaacaaacaaacaaaaaacctgtaataaattaaaacagcaaaacatacccaaaaatgcatatcggcaagttgagagaaaaaattttgcttgggcaattttatttccaagtccactttttcagtgtacactgtataatacttagcaaattatcttaagaattacagatgaagatttctaaaatcagtgtagattaaggaaccagtaaagtgacttggtgacaataattcaacatatgtaaggataaaagagtagggagatcaacatccagataccaagtcatcaatgatctgctttgtgaccatgggcatgatgcaattgtaaaaatgcaaaaatgcctgaatcctaattttcagtgatatcctaggagcaaacgaaaaatacaaataaagtcatttgagaaaaacatgcaaattcatcagttattacataaatcccactcaccaaattacattcttaagagtataggttgctagttgccttatataaaactgccagctgttttcaattttgtaggcaaactgctctaaatgggcccctgggaactcccactacatgttgaattccatccttttcagtcctctgaaaagcatgtaatccaacaaatcaatcaaaatatttcatgtatagaaacaaagtttttcaggagggcatatatccccaaaatatttttaatcaagtatcttaatattcttagaactctggtccaaattctcttctactaatcccttgactacagccaatgcctagagtttacactaatttgtggatattttgctgttggaaaaatttaaaagtacatttttttaaatgtagaataaaaagtccttaaagattttttgtttgtttgctggcattttttgcttcgttttgtattaaggggtatttttattattttatttttgccagcaaatcataactttgtaaataacaaggaatttaaaaaatttttcaagttggttttgaaacttcagaatatttgtttcttaacttgtttccttacattctttacttccataaagatactcggaaacagaagagtaatggtatttgttttcattatacaggtaaaaagaatgacagtgaattacttaaaataactaagtttacttatagaagctgaaaattagacatataaattagattttctagtctttccatccccacgtgtaaatatgtccattaaatatgcctatgcacacatcaattcaagcaaacctcctacatcaaatatcttaatctacaccaaagactgggagattatttgattttttccctttttagaagttcacaaaaatttattcataaaaacagcttgggctggatgatggcatgtgtctgttgtcccagcttctctggaggctgcaactggaggatctcttgagcccaggacttctgttcaggctgggcaacatcacaagaccctgtctctaaaaaacatttttaaaatacaaaaaaaacccacaaactattttgtttttttaaaaaactgacttataaaggaagaaaatgtattcactgcaataagaaccataattatctacttagtttagtctgaataagcaaaagcctagtagttatagatttttcactttttgacttggtatgtaactgtggaaagtgtcaatcatctgctctcatacatactaatattttatgtcactatacatgtctactttaaatatcacagatattatctaacacagacaaaaagtttaacacatctttttagccaccacttatagaacacttactatgtgtcagacagtatactaagtactttacacacgtaatctcattttgaggataaagaaaatgaggtttagagaagtttagtaacttgcctaagaatacacattaagaaactggttttcaaaaccagatcttgtgataacaaaggctccctgctattaactattatactaaaaagtcacttaaaagaaacgtgaaggtcagttatcaagttgtttcatccttatttacagtttactcataattgctgtgttcagtatttatttagcacttactatgtgggtcacatcctgcaaggttctggagataggacctttatccttgagaagctcacagtctatctggaaagatagacaatagaaatgctttggtttatttaattaaggaactatcaatagaatttcatccaaatttaatgcattttaacaaatatttttcaaacctattataacttgaaggcttttattaattgtcaaatgtaaataatggactgcgtttatgaagtcttagattatatatatagatagggctaagaatcgtgcaagccactatttaaatgagggaaaccaagagtttcaactgaattatgcaagtggaagaccaagaataaatggaatataaatttatgttaccatttttttattaaaccttaaataatttgtatttggggtttgtataccctaagcacttatttaaaatgaattcctcaatcacatttatgataatgataaattaactcaaatatcaaaatatcacttcctcaaggaaaccatccctgattctcagactatgtaggattccccaataacagattttcaaaacatgccttatttgtcttagtactaccacaactgtatttacaccatttattgtgtaattgatcatttatattttttccctttataggatatataagctccataaggcatctttgtcttgttcataactatactcccagcagctaccaggccttgctaagagatgataaaacatgttatagcatgaatgaatgaatgaatgaatatagcaaaatgtacctttttctaaatctaactcaactaagaggaacttagaatctcggacataaatgagagttcctgttcttcctacagggttattcatcaccttcaaaataatgtcttatgtacattatctcttttcatcatggaggtacaatgttaagccttcgaaaacatgcttcagtagaaaagcaaggtttttcctgggaaaatttctaaagaacagatacagaaggaagagttacaattctcaagaaaaaacattcatttcattaccaaactaccaatttaatacaaacccaaaaatgatcctatgagtgtatatccaaaacactagtctattcttagtcttctaaaaagaacagtctcaaataacatccttgatggagccaatatacaaacataactttctgactatcttcttgatgccatggaaggagggaaagagaagaaaaaaaggaagatagaaaagaaatgaaggaggaagtgaagcaatctctattgggccttctaattgtactttctatccatctgttatccagtttccagtttaaattctggctgcacaggaatgtaccacttcttttcaacattctcttctctattaaaaacaaggttgatttttaatgataaaaaattaaaaatttagaaagaatacacaaagcatcagaaaattcctaatctgctgagtgaggaactacaagaaataaagaaatggaaagttgccattgagcacacagtaagagtcttgccagcgtgtcccactgcactttttctctgttcatcatccctatcataaacgctccaactattaactaccattaaaatatgcaagtctgcactttgcaaacaggttaggttccaaaagggtcgtgttcttattaatcttacaagctttcactattgttacaagttaatagcagcagggtaaaagtcttctgtttatatccatgaaagttcattaagtaaaggaggttctaaacttgtattaaaactataaatgaaggaaagccaatgtaaaatctaaactaaaaagtaataccaactcaaaatctctgcatgctaaccatatactccatctatgttcttcctcaccaatgaagctaggtattatataatgaaggaaatttataatcaagaacacacgtaattcagcaaggagcaaagtatgctttcctgtcacgtggtaggttcaaacccccaaaatgttaaaggactgacaaaagtaatcttgcttagcaaaacaaatattgttagaaagacttcagcatatgctatttctcaaaggtctcaaagaagatatacatatgattaatactaatattactacatactaattactaatattaatacatactaatataatacaaaccaaagtactaaataacagtttttaaacatcattgtaaaactgcttctttcctctgctttccaagtttggtcataaaaccattatattaaaacaaataggtcaggcatggtagctctcacctgtaatcccagcacactgggaggctgagtggggcggatcacctgaggtcgggaatttgagatcagcctgaccaatacagtaaaatgccttctctactaaaaatacaaaaattagctgggcatggtggcacatggctgtagtgccaactactcgggaggctaagggaggggaatcacttgaacgcgggaagcaagagacttcagtgggctgagattgcaccactgcactgaagcctgggcgacagagtgagactcagtctcaaaacaaacaaacaaacaaacaaacagtctatcaaaactaacttgaaatggaagaatttttgcaatgttctacattacaaataaacttttgaattgacactttttaaccttatataccttcttcatctataatagataaaaatcctatctcaactattatatattatatataataatttcttaataatttcaactattctagctacaaaaattatcttaaaagcaattgcttcatttgcttttatatctaaatttgcatggatgcttctttcccccacttgcaatttcttttttatttaattatttatttttttgagtcagagtctccctgttgcccaggttggagtgcaacggcgtaatctcagctactgcaacctccacctcctgagttcaagcaattctcgtgcctcagtctcccaagtagctggaattaaaggcatgtgccaccacgcctggctaatttttgtatttttagtagagacggggtttcactgtgttggccaggctggtctctaactcctgacct

SEQ ID NO: 6789 - DNA, 46193 bp, Homo sapiens
  misc_feature (1)...(46193): n = A,T,C or G, or insertion/deletion polymorphism (see Tables 1-2)
aaacaactcaaatgtcctttaacattgatatttccacataatgaaatattattcagcaataaagagaaataaactattgatacatgcaacaacttggatggatctcaaaagcaccatgctttttagtgcaaaaagccaaagccaatagaaaaaccattaactactacagttgaccttgaacaacacaggtttaaactgtgtgagcccatttatatgcagatttttttcaataaatatattggaaaattttttggagatttgcaacaatttgaagaaactcaacagatgaaccatgtagcctagaaatatcgaaaaaatttaagaaaaaggtatgtcatgaatgtgtaaaatatatgtaactaccagtctatttttgtgttgactatgttattggtaaggcttccagtcaacagtaggctattagtggttaagttctggggagtcaaaagttgaacatggatgttttactgtacagggggtcaatacccctaacccctgcattgtttaagggccatttatataatggtacattggacaaaactatagtggtagagaacagattaatggttgccagggatggagacaagagtggatataactataaagggatagggatacccagtgaagttccttggtggggatgaaacagctatcttgatttatagtcgtatttgcagtaatctgtaaatgggaccaaattgcatagaaagaactatatacacacatacacacacacaggagtggatgtaaaaactggataaggtctgtaggtctagttaacagtattgtaccaacgtcattttcctggcttttaaattataccacagttacataagatgtcatcattgggggaagctgagtgaaaagttcatgggattcttggtactatttttacaacttcctgtgagtctataattatttcaaaataaaaaggtaaaaaaatttcacttttattttattttttgagatggggtcttgctgtgttgtccaagctggagtacagtggtgtggtcatagctcactgcagccttgacctcctgggctcaagggattcttctgtctcagcctcctgtgtatctgagactacaggtactcaccaccacacttggctaattatttaatctttaattttttttttttttgtagagattgggatcttgttatgttgctcaggctgtctctaactcctggcctcaaatgatcctcctacctcagcctcccaaagtactgggattcaagacatgagccactgcactcggccaatttcacctttcttttttaatgtgaccacctgaaaattttaaattacatatgtggcttatatcatatttgtattgaatattgctgctctagagactccaatgtatgcactggattaagctatggggtcaatcattatatgttccagtaatctatggggtcaatcaatatatgttcctagtaatctgcggtagactttcctcacaaaactctgtagtcaaatacattcaggaactgtaataggttgaacaaagttacacagatttctttacaagagatcttccaggtctttaatatgcaaatgtttatcataaatctcaaatactctcatttcaaaggaaactaaggcacagagggattaagtaacctgcttaaggtcatttggttagtaagcgatgaagccaagattcaaatcctagtaatctggctctcagaggaaggcctctagaaggaaatgaagagtttgagattttagtgaattgtaccattgttctatataaagataaagctaagagcccagtcagtggagcttgcactttaaattatttctcaaattgtggagatcaatttgtgcagacttacctgtatgtctctcattcagtggtcctacaaccaagagcttgtctttgaaaaagtggaaaggataagaaatacaaattcaagctatgaaatagagacttaagacattttttagtctgccagggaaatctatgaattgacaattagataacaaaaaatatcattaaatttaataatggcactatgactacatacaaaaatgtccataatttttagagatgcataatgacatatataggggtgaaatggcagtatctgcagttttgctttcgttatttcacagagaggtgcagagaagttaataaaaggataaggaggccaggtgcggtggctcacgcctgtaatcccagcactttgggaggctgaggcaggcagatcacgaggtcaggagatcgagaccatcctggttaacacggtgaaaccccgtctctactaaaaatacaaaaaattagctgggcatggtggcgggcacctgtagtcccagctactcgggaggctgaggcagaagaatggcgtgaacctgggaggcggagcttgcagtgagccgagatggcactactacactccagcctgggcgacagagtgagactctgtctcaaaaaaaaaaaaaaaagaaagaaaaggataaggaagatagatgaagcaaatatattaactttgttaactgttgaatgtggggtgacaggtagtgcatgatactattctctatatgtttatgtttgaaatttttcattaaaaaatgttaagctgtatgttgaaaatcattcctttcccatactcttttcaacaattataatttttaatggctaggtagaaaactaaagttacggcttcaaagcaggttatcattattataacatctaaagtaaaaattgctttgaatttgctcccattaagatacattttatcttcattatcttcattattcacttcatcctgactccagctacagaatcatcttttgggccttatagggagtatcaaatcaacaatcaagaacaagtaggccaggcgcggtggctcacatctataatcccagcactttgggagaccgaggcagacagagtccaggagttcaagaccagcctggggtgaaaccccatctctactaaaaatacaaaaattagctgggcatgtagtcctgtgacttgggaagctgaggtggaagaatcacttgaacctaggaggtggaggttgcaactgagccaagatggcaccactgcactccaacctgtgcaacagagactccgtctcaaaaaaaaaaaaaatagaaagaaaactgatacaactatactagttaataataattctggcccaacaagtgcctatcatttttttccatacaagattttttttaactttcagaatggttggaattaatcataaaagcagatttttagctaaacctcagtcactttattgggaaaagacagtttcctcacaattttttttttaagtaggaacaacacatcccaaatctaagagatgactgtttcttcttcctagttcccaaagagtttactaggaactaaactgctaccatgtagatatcttattccttaataaataataagcttctaaaaggcaaagagaggttttagacttattttctttgtatgcctattgtatcccaagtaaaagtgcgaagggacaaggaaaataccatttattgaggatgtatatgtgtcaagctccacaccatcactttattcttatttttatttatttatttatttatttgagacagagtcttcctctgtcacccaggctggagtacagtggtgtgatctcggctcacggcaacctccgcctcccaggttcaagcaattctcatgcctcggcctcccaagtagctgagattacaggcatgtgccaccatgcccagctaattttttgcatttttagtagagacagggtttcaccatgttgcccaggctggttttgaactcctgagctcaggcaatcgcccaccttggcctcccaaagtgctaggattacaggtgtgggggtccacaccatcattttaaataagcttttggataaggtgttactcctatattgcagaaacgaaggctcagtgatgtagtaatttgcctaaaagtcacgtggctagaagacagcctagccagaaacccaagaatgattcaaaatagcatgcttgcaattatcatgtatgtgcataattaatatttaataaattaaatagttaataattaatattaatagttaatatatttatggttgctaaaattacatagctaaatgaaaggaaaagttaatatttaattaataaatttatggttgctaaaattatatagctccatgaaggaaaaaaaattggaatttggggttaaagcccaagctcaactcctgactttttggctatataatcttaaaatatgtaacatttctgatataatttcatcttctgaaagactgaagataatcatacccactttacagagttgttaagatcaaaaagtgaagtgagctgggcatggtggctcacgccaacactttgggaggccaaagtgggagaaccgcttgagtccaggagtttgagaccagcctgggcaacatagtgggaccctgtctctaccaaaaaaaaatttttttttaattagccagttgtggtggtgtgcacctgtagtctcagctactcaagaggctacattgtgaggatcacctgagcccataggtggaggctgcagtgagcaaggattgcactactgccctccagcctggacaactgagcaagaccctgtctccaaaaaaaaaaaaaaagtgaaggcccttttggaagtgtaaagcattaataaatgtatgacactattattactttctaaattattatacaccacttcggtcagggtagggggcagctctttttatttttttattatttatttatttattttgagacggagtttcactcttgtcacccagactggagtgcgatggcgtgacctctgctcactgcaacctctgcctcccgggttcaagtgattctcctgcctcatcctcccaagtagctgggtttacaggcccccgcctccatgcccggccattttttttttttttttgcatttttagtagagatggggtttcgccatgttggccaggctggtctcgaactcctggcctcaagtgatccgcccgcctcagcctcccaaagtgctgggattacaagcgtgagccaccacggccggccgtgagggtggatctttttaaagccagaaatatttgctctttaaagtctcaaaagcaaaactgatctttatggattctggtgcttaattgcagaggtggggaggcagtatgtgtgatggttatgaccacaggcttcggaatcagatcgacatcaggtttgtacctctcagctctaccaccttcaagctgtgtgatctttggcatgctacaatctttaattctgggatctttatctgtagaatgtgcaaaataatgttcccaatctgatatcattgataggaatgagcaaatgtatgtaaatagctttgcacagtgtcaagtgagcactttcctggagccctcagttagctattaataacttctcgagctaccatggccattaacaatgggacctgaagcactgcggatgctacaaatgcttcagcagacccagtgcttgatttcaggaatttcagacgaagggcgacacgccctcagctggagatggaggaagaaggggcagggtccagcagggctgagaggagagaattccgaagaaaaatctctccccagccctgggaaaggaaaggaacgaaggactggtcaaggagggtccccagagcgcccgccgcccgccccggctggggtggctgagcagtccactcacagctccaagctctgtggcaccgccttccgagtgtatctggagatcatcctcctcctcctcctcctcctcctcctcctcagccgcggccggggcaggcacgccagggtgggggcctccgggcctggccctcccgccggctccggcccggcccctcccgccacctaccggccccgtctcgccccgtcacctagactccgagcagccacctccccagggtccccacctctccagtcctccgacctccctgctttgccgcgggggcggaagtgacgaaggcccccggacactcgcaaaatgctcccgccgacgcacagcagtgacgacacacaaggtttcggggactgagtgggtttcagactttctctcaggatttccgctggcttcaggttccggtcaggcgtcgggacagagcctgatccaggcttcggcggccggtggcagctctcgatcagctctcgcagtcggagaggcggctaaggaaaggtgccacagcagagacgcgaaggagaggccctagaaccgtaagagaaattggcttcattttgttagatggcaggagggagcctagactggggaaagagcactagactccaagtcaagcccctgctgcttggtcgcttctttttctgtactctgggttttctcatatgtacagtgaggyattagcctgagtgatcatagagtcccttccagttctgacaccaaattctgcatgatgacgtgtgtttggcgttatggggtggatgggtaaaattactgtctgtccctctgggttgaaaggcaaaatgatgatttggttagactgtggtgagtgggtgtctggataagaagaagcaggttccttacgagtctcttagaaagctgagtaagattggaatcatggagttagggtggtccatccaccgccatttctttctttaccaagcatcacctggcagcaagaataaactagtactcttatttaggaaaacccttagaaaattaagagataaggaaaacccttagaaaattaagaggtatcaatgcaacctccatcaaaataccagtgacattcttcacagtcatagaaaaaagatcctaaaatttatatggaaccacaaaagagccagaatagccaaagctatcctgagcaaaaagaacaaaactggaagcatcacattacccgacttcagattatacaacagagttatagtaaccaaaacagcatggcactggcataaaaacaggaacagaatagagaacccagaaacaaatccatatgtctgcagtgaattcattttcagcaaaggtaccaaaaacatacattggggaaaagacagtctcttcaataaatgatactgggaaaactgatacccgtatgcagaagaatgaaaccagacccactacctcccaccatatacaaaaatcaagtcaaaatggattagagacttaaatctaagccctcaaactatgaaactactaaaaggaaatattggggaaactctctaggacattagagtgggcaaagatttcctgagtaatacctcacaaacagaggcagccaaaacaaaaatggacaaatgggagcacatcaagttaaaaagcttctgcacagcaaaggaaacaatcaacaaagtgragagagaacccacagaatgggagaaaatatttgcaaactacccatctgacaagggattaataaccaaaatatataaggagttcaaacaactctctaggaagcagtctaataattgattaagaattggataaaaactctgaatagacatttctcaaagaagacataaaaatggcaaacaggtttatgaaaaggtgctcaatatcattgattatcagagaaatgcaaatcaaaactacaataagatagcatctcaccccagttaaaatggctgttatccataagacaggcaataacaaatgctggcaaggatttggataaaacactgttggtgagaatgtaaattagtgcagtcactatggagaacagttttggagattcctcaagaaactaaaaatagagctactatatgatccagcagtcccactgttgggtatttacccaaaaraaaggaaatcagtatatcaaagagatatctgcactcccatgtttatcgcagcactattctcagtagccaagatttggaagcaacctaagtgtccatcaacagataatgaagaaaatgtggcacatacacacaatggagtgcttttcagccataaaaaaaaaaatgagattctgttatttgtaacaacatggatggaactgaagatcaagtggaactggatggaagtgaaataaggatggcacagaaagataaacttcaaatgttctcactaatttgtaggagctaaaaattaaaacagttgaactcatggagatagcaagtagaaggatggtttaccagaagctgggaagggttgcagagggtttgtgggggagtatggttaaagggtacaaaaaaaatagagtgaatgaaaactagtatttggtagcacaacagggtgactatagtaaataataatttaattgtacatttaaaaataacgaagttcagatgagagcatgtcctggctataaaaatttttttaataaaaataactaaaagagtataattagagtgtttgtaacacaaaggataaatgcttaaggcaatggatatctcatttaccctgaggtgcttattatgcattgtatacctgtatcaaaatatctcatgtaccccataaatatatacacctactatttacccttaaaaattaaaaaaaaaaaacagcactttgggaggccgaggcaggtggatcatgaggtcaggagtttgagaccagcctggccaatatggtaaaaccccgtctctactaaaaatacaaaaattagccaggtgtggtggcgtgcgcctatagtcccagctactcgggaggctgaggcaaaagaatcgcttgaacctgggaggcagaggttgcagtgagctgcgatcactccactgcactccagcctgggcgacagagcgagactccatctcaaaaaaaaaagaaaagaaaaagaaaagaaaaaaagaaaagaaagatatacctaccatcccatgagacttgaaaaaggggcaaatttaggacagaggtaaaatgacaggacatgaatgttttgtagttctgaattcctctacgccatacaatgttcataaaagagagagatgtacattctgtagagcaagacagattgtactttagagtttaaataacaaaattttaaagcagggagagattttagagatggtagataacttatcctaaattaaagaaaaaaacccagaaagagaaagtgaaatgtccatagtggcacaactaattagtggcagaactggggtttttgatagtatgtaaacagtaggtgttagtgcagtgtttctcgaaatatattacacataccactgctagtacaagggcaaacattaaaaatttcattcttcacttccaaaataggaaaaatataaaaagtaaagattttattcttacatacttactaattggggaatgtgatactagatttctattcactgtattatatcaaggtttccttttaacgtaattttaaagataaagttttaagtgtaaagggtcattaaaaataatattaggccagatgcctataaccccagcactttgggagaccaaggtggaagaactgcttgagctcagaagttctaggccagcctgggcaatatggcaaaaccttgcctctactaaaaatacaaaaaaagttagctgggcatggtggcatgcacctgtggtcccagctacttgggaggctgaggtgggaggatggcttgagcccaagaggtggaggttgcaatgagctgtgatcatgccgctgcactccagcctgggcaacaagagtgaaactccatctcaaataaataaataaagtttaaaaaaattaaataaatattactgtaggtggtgtatggttaaggccaaaaccatggtgatggtatgtgactaaattttatttttttattttttatttttatttatttttttttttagttggagtcttgctctgtcacccaagctggagtgcagtggcatgatctcggctcattgcaacctctgcctcctaggttcaagtgattctcctgctttagcctcccaagtagctaggatcacaggtgcatgccaccacacccagctaatttttgtatttttagtattttgtatttttagtagagacggggtttcaccatgttggccaggctggtctcaaactcctgacctccagtgatctgcctgtctcggcctcccaaagtgataggattacatgcatgaaccactgtgcccggcctaactaaattttagaaaacartgttcatagaaccatctaaaagagttcagatgttacttctgcattgttctatgtggtttatattttggaactttaaacatagttttcaaagaagaatggaagaaaccatgaagcttgctamgatggaagacacagtggagtactgcctgttcctgataccagatgagtcaagggactcagataaacataaagagattcttcagaagtacattgagagaataatcactcngtttgcacctatgctggtcccctacatctggcagaatcagcctttcaatcttaaatataaacctgggaaaggtaaggctcttttacttgtttggattagtgtgacttttaatgttatcctgacaacagtgatgtgtaatagtccacgcttcattcagtgttgccaggaagagattaatacactaaactttttagatgagtaatacttgtctatattcagttagccttaaagcttttttttaaaaaaaatcatattaatgaaaactttctaaatttgccttaggaattagcatatactaaacattattaaactcatggctattcttttgaactttagttactacactatgccataatgtatctaagtatctatactaaatagtttcaggcatctggctttaatcatggttccttttgctgttactcaggaytccttattttggtgatgtgtttggtaggctgccttgtttcatatagccattttggtgaggatctgagtggctctgcccagcttataaagataaataattgggctttatgactaatatttgccacttacaagcattttgaggtttcttcattgcttccctgtgttgttggtgcttgagatctgacctctggcaaaatatggcactctgtcctgttatgagaaaaacccaggattaaactaggagggagcggagagaccaaagaatgactcggacaggtctatcttggcaagtagatgagtttattaggacttacagacaagacactcctgggcagcatcaggacagctctagaaatccaccccacctcccatatttaagttgctwgtaagctaattttttggctctttgcctactgcgtatatgcaatgacactgttttccttggtatgttcccagctatgccctgcaatgtttgggttctcaggacctgctcctctgctaggcaygatggctttggcttgccagctggcctttgaagtttaagcagcagacatatacccttaagtagtctggtggggaactggtcacattacagttctatcatttcttatagttttatgaaaataaatcatgggtaggtgaccaagtctctccttacacagtgacttatgtgaggtcttatttgggatcaggagcctggcatcttgtgataccatcacaagatataccccccatgtatacatcacaagtatacatcactgtgatactctcagtttagtgcgtatctgttatcttttggcaacaattgctacatatcttactgttaattttattgaactcttattcattgaaatacatatgatatttattggcaagaacactgtcacattggtgtagcacatctaaaaccaaccctttatccatcctctagaaaaccatttttactgttttcttatcttgtttaatggcattgccatccacccagttatccaagctagtcagtaattcaaaatcataatcagttcctcacttcaccatgttcagtcagatgctaaatcctgaatgcttctaaaatatgaccccttctctacatctatttggcttcagtgtagaccctctttatctctacatctggaaaacaacaacagcctcctaacttacctctctggttcctgtctttctagttcctaacactgttgctggttatgtttgtaaaacacaaatttgattgtgtcactctcctgcttaatatccttcagtagttcccattgcttcaagatgaaatttaaatcaaagtctaatatagacaaaaatagttactttaattggagttctctagttgaagaaacttgagatctggggtggggagaagaagagttggttgggctgttcttctacctattgtttgccatggcagctcttgagacactctgtaatgcacttgtttgaccttcattctgttaatgtgggatattaactgtacattgattttcgtgtgttgaaccatccttgcatcccaggaataaatctcgcttggtcgtggtgaataatctatttaatgtgttgttgaattcwgattgctgatattttgttaaggatttctgcattgatactcatcagggatattgatctacagctttctcatattgtctttgtctggctttggtattagggtaatgctggcctcagaaggaatttgggaattccctcccttttatttttttggaagattttgaggaggattggtgtcaaattctttaaatgtttggaagaattccccggtgaagccagcttttctttgttaggagcttttggattattgattcaatctccttactagttatagatctgttcagatttttgtatttctcatgatccagtcttgacaggttgtgtttctaggaatttgtcaatttcttataggttatccaacttactggtataccattgttcatagaattctcttatccttcttatttctatgacataagttgtactgtcccctctttcatttccgattttagttatttgagtatttgctcttattcctggttaatcaagttaatagtttgtcaatcttttaaaaaaaacccaactcagctgttttgtttttctattattttttctggtctctatatttctctctgctgtaatgtttattatttccttccttatgctaggtttgggtttagtttttgttttttttttttgaggtataggttgttgatttgagatctttcacaactacaaacttcctttttagcactgctttcactgaattccttaagttttggtatgatgtgcattcattttcatttgtcccaagatattttctaatttccctgtgatttattccaagagtgtgttgttgtttagtttccatgtgtttgtgaatagtgcacatgtttgaaaacttctgctccatccaaatctagcgtcctggtattcccagaatactctatacatacatactctatacatcatgcctctgtgcctttgcacatacttttccatttttctggaaagctcacctcttgtcattcctccaggcaagcatagcacagatatcccctcctttatactcacatagccgttactgcacactcctgttctagagttcattatcttgttttgagatcatttggttgtcttgttttaccctgagctcctcaggagtaggcttcttcttcaggattrcaacccctgctccccagtacttagagcaatcagtcaatkaatgtgtattcagttgaatgattatgtgcattttatttgcagtaacaaatttatctggttacatggttgcttttctcttgtttttaggaggtgttcctgctcatatgtttggcgtgacaaagtttggggataacattgaggatgaatggtttattgtttatgtaataaagcagatcacaaaggaatttccagagttagtagcaaggtattgtagttattttaattattctaaaggaattctattactgaaacaaagtgactacatttttatctatttagtaatttatttttctcctgtagtctgctggaaattgtacagattttaatagtatctgtgctctttttttttttttttgagacagtcttgctttgtcacccaggctggagtgcagtggtgtgatcttggctcactgcaatcttcaccttccgggttcaagcgattctcctgcctcagnnnnnnnnnnnnnnnnnnnntaattgaataaaagaatggtaagttaagagaaaatcaaaatataaagtgggatgagtatattgattaagaaaatacaaaaaaaaagatatagagtggaataaggatgaggacaagaataggagtgaggaatgattatagagaggagaataggaaagaatagtgtattagaggtcatgtagtggatgagaggaaaagaagataaaagatttatgaggttgagagatgataaaagaagtgaagatgtgtgatgaaattgaaagatatataaatgttatagagttgagaatgtagtgattgtaaaggtaatgatagagaaatatgaaaaatatagagtagtatggaaatatgtaagagaagaaagatgaaagaagtataagaagaagaatattgaggaagagaagtgaaggagtgatgagaggtagtacatgtaggagagaggggagatagaccattatagtgagttaagtgtgatataaaagtgagaattcaagagtagtgtgagaagatattagtagtgcgcggcacaggagcggtggctcacacctgtaatcccagcactttgggaggccgaggcaggcggatcatctgaggtcaggagttcgagaccagcctcaacatggagaaaccctgtctctactaaaaatacaaaattagccaggcatggtggtacatgcctgtaatcacagctactcgggaggctgaggcaggagaattgcttgaacctgggaggcggaggttgcggtgagccgagatcgcgccattgcactccagcctgggcaacaagagtgaaactgtctcaaaaaaaaaaaaaaaaaaaattaaagtactgtcaaagagttcaacttccaaaagatttcaaataaaacctacttattttaggttttctttttaaagttctaattatgaaaaaacaaatacatgtggtaaacaaaattcaaaagatacaaaggtttctactgctcttgcttcccagaagtaatcaccattaaattccttgtggatctttgaaaaataaaattccattcatacacatacacacatatttcacgtatttttaaatatgtattcctgtactagaccatagctatattttttgagaaatcatacacagaaacaatttaaagagaagtcagtgaacacaattgtataggaagcaaagtaggtaacattacgttaaaaatgggacctgggttttctgtaattaaccacgtattgccagcagagggcgttccgcccacttatattttgtcctagttttcctagtcagcacccaaattctgatctttttttacccactcaacctctttcccaacagaacaaaatagaagggagaaaaaaacctttgaaaacttattatttaaattttaaacatacattaaagtagaaagaatgaacccacatgttcccattatccagcttcaacaattaccaactcatggtcattattatttcatctgtagctgtcatttgatccttaaatatttcaggatgtaaatctaagcgataactcattttatttttatctttaaataaatttatttaaaatttttaaatgttttaaatttatttattatttatttagttttttaaagacggggtcttactattttgcccaggcgggacttgaactcctgggctcaagccatcctcctgcctcagtctcccaagcagctggtactacaggcacatgccactgtgctctattttattttattttatttttttgagacaggctctcactctcttgcccagactggactgcagtggaacaatctcggctcactgcaacctctgcctcccgggctcaagcaattctcttacctcatcctcctgagtagctggggctatgggcgtgcaccaccacacctggctaatttttgtattttttgtagagacaaggtttcaccatgttggccaggctggtctcaaactcctgacctcaagtgatccacctgcctcagcctcccaaagtgctgggattacaggtgtgagccactgcgcccagcctatttttaaaattgataaataaaaattttatatatttattatgtataacatgttgtcttgaaatacatatatattgtaggatggctgaattgagctcataacgtacattacttcacatgacttgatgtattttggtgtgtggatgcgaacatttaaaatctactgcccttagcaagtttcaagaacacaatacattgtaggcctggggcggtggctcacatctgtaatcccaacgctttgggaagtcgaagcggaagcatcacatgaggtcagaagttcgagacgagcctggccaacatggtgaaccccatctctactaaaaatacaaaaattagccatgtgtggtggcccatgcctgtggtcccagctactcgggaggctgaggcaggagaatcacttgagcccaggaggtagaggttgcagtgagtgtgattgcaccactacattccagcctgtgcgacagagtgagactctgtctcaaaaataaaataaaataaaataaaataaaataataaaaatagaagtatagagctagaacgatatataacagtatataaaatatgccatgtcttgtgtaaaaaagggagaaaatacaagtatatatttctatagttagattatgtgtaagcaaactctagaaggatatacaagaaacagcagtgatgcatgtagggttgagcagatagggacaaaagtaggagggagacttttttattttgtaactttttttttttttgagatggagtttcgctcttgttgcccaggctggaatgcaatggtgcgatctcggctcaccgcaacctctgcctcccaggttcaagcaattctcctacctcagcctcccgagtagctgggattacaggcatgggccaccacgcctggctgattttttttgtatttttagtaccagacggggtttctccatgttggtcaggctggtcttgagctcctgacctcaggtgatccgaccannnnnnnnnnnnnnnnnnnnnnnnnnnnnnnnnnnnnnnnnnnnnnnnnnnnnnnnnnnnnnnnnnnnnnnnnnnnnnnnnnnnnnnnnnnnnnnnnnnnnnnnnnnnnnnnnnnnnnnnnnnnnnnnnnnnnnnnnnnnnnnnnnnnnnnnnnnnnnnnnnnnnnnnnnnnnnnnnnnnnnnnnnnnnnnnnnnnnnnnnnnnnnnnnnnnnnnntgcactctaggcctgagtgacagagcgagactccgtctccaaaataaaaaaaaaaaaagtgatgcaaatgaggcagaaataattatcttttcaggcccaaataacacctcctacatgaaggcttttctaatctcagctatgtgtttcttttttttcttttggaaccctatagtactttcgtatattttcatatttttgtctaatatttctttatgtaaattgcttatcttctctccttatcatatctaccttcaactcctccttacaatcttacagtctccttcagtgcttaatgttatcttaaatattttgctttcttatagccatctgcacatagtacatactcaaatatttactaagatgaagaggaaaatgtattagaatgaaactgttttggttactagcagatatatgctttttgaatgcaaaattggaaattttcttgcattaggattgaagacaatgatggtgaattcttgttaatagaagctgctgactttctccctaaatggctggatcctgaaaatagcaccaatagggtaagtatacccaagtttagaaaatttatagagatgaaatcatgctgcattacattcatatgtacctgcagtttgccagtgcccactgtgaaaattgaaatgtaccgtttgcaggtatttttctgccatggggaattgtgtattatccctgcaccaagaaaatctggagcagaatcttggttacccaccacacccccaacaattccacaagcattgaatataatcacagcacattcagaaaaaatacttgcttcagaatctatacgagctgctgtgaataggcgcatcagagggtaagaaaaatatcactttcattgctaattmaggaaccttttggtttcgtgtagttcagtctttctttgatttttgtttgttttccttaaagctctgttggagttgatcagtctttctttgactataaaatacctttcacctagattaatgctaattttcattttgtcttcattcctctttatgaaatagactagtaaattaaacttacagattttaaaatcaggaaacagatacatctttaaattcccattcagaagtgttacaatcttgtcccaatatttttgcatttatttaccttagatattgtggctaagtattagctatatccatgggtaaaaaatttgagacctttaaaaatagaaacttcatgggcctggagcgatggctcacacctgtaatcccagcactttgggaggctgagcagggggcggatcatgaggtcaggagttcaagaccagcctggccaacatagtgaaatcccatctctactaaaaatacaaaaacaaaatagcagggcgtggtggcaggtgcctgtaatctcagctactttggaggctgaggcaaggagaatcgcttgaacccgggaggcggaggttgcagtgagctgagatcacgccactgcactccagcctgggygacagtaggaaactccatctcaaaaaaaaaaaaaaaaaaaaaagtagaaacctaatggagcacaaacaaggtgctcaggttttttctgttgttctgggtctgtatatgggattctttgacctatgtcagaattcagtttctgaataaaactttagcttttattcagaaaagaaaggtcttagcctaattacatattcgttcatccattcaaatttgggtgcctattaaatattaagcaccattcaggtattaacaatattaaaaatatttttggccgggcgcggtggctcacgcctgtaatcccagcactttgggaggccagggcgggtggatcacaaggtcaagagatcgagaccatcctgaccaacatggtgaaaccccgtctctactgaaaatacaaaaaattagccgggcgtggtggcaggcccctgtagtcccagctgcttgggagactgagcgcaggaaaatcacttgaacctgggaggtggaggttgcagggaggtggaggttacagttgcagccgaggttgcagccactggcactccagacctggtcgtacagtagtcgagtactccgtgctcgaaaaataatatatgaaattaataactatagaatactctctttctagtctgcagtcatactattgattaccatgtctattttagctaagagataatatctcctgtattatttcatgttctttgtaattgcgcgcgtctaggtagtgatattcacggctcattttacctggcttgttctgttttgcgcgtatttttctgtcgcgagtgggtgactacgtgtagtcatttgttgtttagtctttcaaaggtgtcttattgctttgtcgtttccttcggtcgtatactgttccccacgtgttttcatgctctattctcaatcaatatcttcttttatatcttattgcttccaactttctctatattctttcaatattacattattctctttttatatactatgccatcataatttttcttctatatctacttcgttactctttattttactatatccttttttatgttcgtacttatcactactcagcttcttctctcttcatcatcnnnnnnnnnnnnnnnnnnnnnnnnnnnnnnnnnnnnnnnnnnnnnnnnnnnnnnnnnnnnnnnnnnnnnnnnnnnnnnnnnnnnnnnnnnnnnnnnnnnnnnnnnnnnnnnnnnnnnnnnnnnnnnnnnnnnnnnnnnnnnnnnnnnnnnnnnnnnnnnnnnnnnnnncattattatttttttctttttacatttctcagtgctcagtgaatgaaacattattttaattgttctctagaaaaaaaaggaaatattctgtttcttcatagcatgttaatatagattgaatattccttatctgaaatgcttgggactagaagtatttcagatttcagatttatttggattttggaatatttgcattaaacttactacttgagcatcccaaatctgaaaattctgaaatctcaaaactttgagcatatcgttgggactcaaaaagttttggattttggaacattttagatttcagatatttacatttgggatgctcaaactatacacgttttttcttttcttgcacccagtgaaggaaattttcaagagacctgcctccccattttatactcaatgttttatagctatttttgaccatatgtttctatttctataattatttccttttttttttttttttttttttttgagacagagtctcactctctcacccaggctggagtgtagtggagccatctcagctcactgcaacctctgcttcctgggctcaagcgattctcctgcctcccgagtagctgggattacagtcacctcccaacacgcccagctgatttttttatttttagatggtgtttcgccatgttggccagactggtctcgaactcctgacctcaagtgattcacccacctcagcctcccaaagtgctgggattacaggtgtgagccaccgcacccagcctaattatttccttcttaacaataaaacatttcatctcttccagagaattaagaattattcttggccgggcatggtggctcacacctgtaatcccagcactttgggtggccaaggcaggtggatcacttgaacccacgtgtttgagaccagactgggcaacatggtgaaccccatcgctacaaaaaataaaaaaattagctaggtgtggtggtgggcgcctgtaatccccgctacttcggaggctgaggtaggaggattgcttgaccccaggaggtttgggaggccaaggtgggcagatcacctgaggtcaggagtttgagaccagcctggccagcatggtgaaaccctatccctgaggcttcagtgagccatgattgctcactgcactccagtctctgcaacagagcaagaccctgtctcagaaatagaaaaaatgaattatctttatcttccagccatttaattgctgtataatgtaactaatgataagaattttactagcgattactaaaaagtaggcagtagggtaaaattttttttgcaacagtgtcttgctctgttgcccaggccggagtgcagtggagcaatctcagctcactgcaacttcctccacctcccgggttcaagcaattctcctgcttcagcctcccgagtagctgggattagaggcgtgcgccaccatgcctggcttatttttgtatttttagtagagatggggtttcaccatgttggccaggctggtctcaaactcctgacctcagatgatctgcccaccttggcctcccaaagtgttgggattacaggcatgaaccaccatgcctggccagcagtagggtaaattttatggtatgtgagttgtatctcaataaagctgttactaaaaacaagtaggcaatgaataggttgaatcttctttgcatttcatatgaatatgaagcttataaatggacttctcattatatttaactgtgaagtgttattcacaatcttaatttcaggaaaagactcatgtattttgtgtcttgatgcccaggtcacattcactaaatgtctatatgcacaattggtgcaacaaaggtttgtgccagaccggcggagtggatacaggctgcctcctccatctgatccccagtaccgagcccatgaattgggcatgaaattggtaatgttgaaccagaaaatgttgtttcctttctttatgtaaatggactcttaatagaatagtggcacaatatacaaagtccagaaatacaccctgtttatgtaagaatgcagtaaaatgtggcatttcaaattagaatgaaaaaaatggattacttagtaagtgatgatgggacaagtctgaagtcatctgaaaaattgaagttgattccctaatacctataccaaaataaattccaattggatcaaatatttgaacataaaaattgaaactatacaatttgaaaaaaaaccaagaaccttttataayttgaataggaaaggcctttctatgcatgacttgaaaccagaagctataaagggaagactgatgaatttgattatgcaaaaattaagcatttctgcacgggaaagaaaaactccataaataaagtcaaaagcaaatctggaaaaagtgttatatttgcaatctaaatgaaaaagagctgacttctctaatacataaagtgttcctttaagtcaatatgaaaatgataatactagccaattaattttaaaatgttcagaactatgaacatagtccacagaaaaggaaatacaggtgacctttaatttaaacatatgaaaaatattgaatcttaactcataataaaagaaatgcactttaaagctacaaaatagtgtttttcttttttttttgtttgctttcaaaaatgttacaatctagacattgataggaatgtctagattttctttttttttttattattatgctttaagttttagggtacatgtgcacaacgtgcaggtttgttacatacgtatacacgcgccatgttggtgtgctgcacccattaactcgtcatttatattagatatatctcctaatgctgtccctcccccctccccccaccccacaacaggccccggtgtgtgatgttcgccttcctgtgtccrtgtgttctcattgttcaattccccacctatgagtgagaacatgcggtgtttggttttttgtccttgcaatagtttgctgagagtgatggtttccagcttcatccatgtccctacaaaggacatgaactcatcattttttatggctgcatagtattccatggtgtatatgtgccacattttcttaatccagtctatcattgttggacatttgggttggttccaagtctttgctattgtgaatagtgccacagtgaacataygtgtgcatgtgtctttatagcagcatgatttataatcctttgggcatatacccagtaatgggatggctgggtcaaatggtatttctagttctagatccctgaggaatcgccacactgacttccacaatggttgaactagtttacagtcccaccaacagtgtaaaagtgttcctatttctccacatcctctccagcacctgttgttctctgactttttaatgatcgccattctaactggtgtgagattaccatctcattgtggttttgatttgcatttctctgatggcgagtgatgatgagcattttttcatgtgtcttttggctgcataaatgtcttcttttgagaagtgtctgttcatgtcctttgcccacttgttgatggggttgtttgtttttttcttgtaaatttgtttaagttctttgtagattctggatattagccctttgttagataagtagattgcaaaaattttctcccattctgtaggttgcctgttcaccctgatggtagtttcttttgctgtgcagaagctcttgagtttaattagatcccatttgtcaattttggcttttgttgccattgcttttggtgttttagacatgaagtccttgcccatgcctatgtcctgaatggtactgcctaggttttcttctagggtttttatggttttaggtctaacatttaagtcttcaatccatcttgaattaatttttgtataaggtataaggaagggatccagtttcagctttctacatatggctagccagttttcccagcaccatttattaaatagggaatcgtttccccatttcttgtttttgtcaggtttgtcaaagaccagatagttgtagatatgtggcattatttctgagggctctgttctgttccattagtctatatctctgttttggtaccagtaccttgctgttttggttactgtagccttgcagtatagtttgaagtcaggtagcatgatgcctccagctttgttcttttggcttaggattgacttggcaatgcaggctctttttttgttctatatgaactttaaagtagtttttttccaattctgtgaagaaagtcattggtagcttgatggggatggcattgaatctataaattaccttgggcagaatggccatttttacgatattgattcttcctcaaaatagtgtttttcatcatttattagcaagtatcaaacggcttgataatacatactgggttgttgagaatatatacagaaaaacattctcagacattgttgataggaatataaattgattgtatcccttaggagaacattttggcaaaacagatgttccttgacttacagtggggtaacttcctgataaacctgtcaaaaattgaaaatatcataagtcaaaaatatatttaatacagctaaccaaccaaacatcatagcttagcctagcctaccttaaatgggctcagaatacttacattagcatacagttgggcaaaatcatctaacacaaaggctattttataataaactgttgaatatgtcatgtaatttattgaatacagtatactatagagtacagtattggttgattgcctttgtgatcacattgccaactgcagcttgctgccactgtgtatccagcatcatgagacagtatgcatattgctagcctgcaaaaagataaaaattgtaagtaaggtttctactgaatgcatattgctttcacaccatcataaagtcaaaaaatgttaagtcaaaccatcataagttggggaccatctgtattcatcaacatttaaaatgcacaaacctttttagtcagcattttcacttctagaaaatgattctttatgtattttacctatatacaaggacatatatggagcatagtcatgacagcattgttcatagtagcaggagactggaaactacttaaatgtccattagtaggggaatagttagataaattgtgctctagccatgaagtaagatggatgaatttgtgtgtgctcatgtaagtgatctccaaggtatatggttaagtgtaaaaagcaaggtgtagagtagtgtgtatgcgtccattgagcaacaaaaggggtggagtagaaagctatgcatacagagaggcacacacataatacttcagtgtgtaggttacttctgaaaggatgtgcaagaagttggtaatggtgttctctagcttgatcagggaagctccctgtttgaattatttagccatgtgcatctattattttttttaatcaaaggacttttaaaatgaagtgatttcctctctttactatgtctgagatcatgttcaatatatgtataatttctgttggacaagaaaccttttgtaaccctgttcataatcaaacaaaaaataaatgtaaatttctggttttgtaatcagcaggaaaaggaatctctttgaagagaacaggaatctttattgtatattattttctttccttttatgtttttagtaatctataatgattgagaaacttgggaataagtttatatttttcataaaattcaaaaagtgttataattgtccaaatgcccatgtatccagtcatctagttctagagtgtggctcaatggraaaaaagtaatgtgttataataagatacgggaaaaaaggaacttagtaacaaaaattctacctatctcatctaggctcatggatttgagatcttatgctccaaatgtagcccacatttttctgactgcaagaaatcccttgtgactgcctcaccactctgggccagtttccttgaaagtctgaaaaagaatgattactttaaggtaggacttgcartatatttgcttttaagtattcaatccagggaaaatcaagccagcgacttaaagtcctatagtccatatttaaatgtatgacataattatggaagctagacttaaaggagacctttctagttcagtggtactcaggtgctaatgaaggaggtatctatgaactgtttccagtattagagaaaaactaacactgttggtattaaatgatgaaagtgattatctgtaccagataaaacaacttgcaaaaacttgataatgcaaacatgaaaacaccagataggaaaattagcaaagatgtggattttaaaaattattaaaagatacctagtaaatttctcttaaaatattcaacttcacaagtagtaaagatatatatatatatatatgaacacagtaatgaagaatgtctttcatgtatgtacaaaaggatatgaatgatattctgtgctgtcgagagtatggtaaaaataacactcctataccttgctggtaacattgcaaactggtagaatcttaactggaaagtaatttggtagtgtcttccaagaggtatagaaaggttcaaacttggaaccttcactttgaataatctttttaaaggaaatatccaagaagtggaaaagtcccgaagmatatgatgatgataaagatggcacagcaatacgaaaagtactaatgatattatagtatatatatggtatttttttttttttgagatggagttttgctcttgtcgcctaggctggagtgcaatggcacaatcttggctcactacaacctctacctcctaggttcaagcgattctcctcagcctcagcctcctgagtaactgggattacaggcccacactaccacacccagccgatttttgtatttttagtagaaatggggtttcaccatgttggccaggctggtctcggactcctgacctcaggtgatccatccgccttggcctcccaaagtgctgggattacaggcgtgagccaccgtgcccagctattactgttgttgttattgttgttgtatagggtcttgctttgtcacgcaagccagtgttgtggtaggatcatagctcactgcagcctcgatctcctaggctcaagtgatcctcctgcctcagcctttcaaatagctgagactaggcatgtgccaccattgcctggctaaagattgtttttttttctttttagtagagtcgaagtcttgctatgttgcccaggctggtctcaaactcatgtcctcaagtgaccctcccacctctgcttcccaaagtactgagattataggcatgagccacagtgcccagctagtatattcttaaaaaatgtaaaatactaagtatgactatcactataaatatgcatttagaaaacacaaatgatagtaatggtgggattttgccattttttattctacttggcaaactttctgtactttgttttgtgaattactagttaatcagctatatctttaatttaattttttttttcatagaggcagggtctcaccatgttgcccaggctggtcctgaactcctgagctcaagcagtctgcccatctcatcctcccaaagtgttgggattataggcgtgagccatcgcacccagccaattatatcttaataagtaattaagtaaaagaaaatggtggaaaactttccaaactggaaataggcccttaatggtggaaaagattaggaatcactacatctagccgcgtcccctcatttgaagaaactggagctcaaacaggcccattaatgataaaacagggcctaggacttggggcacgtgattcctgagtagtagattatttgctgcctccctgaaagttgctggtgaacacatttttttcatgacaacttgtgagtaatgttctgatagacctttttttttttttaagggactgatagaaggttctgctcagtaccgggaaaggctagaaatggcagagaattacttccagctctcagtagactggccagaaaggtgagttattgttaagactcctactacaaagattggtatttaggtagttctttttattttttatttattatttattattcttatttatttatttttttgagacggagtctcactctgtcacccaggctggcaacctccgcctcctgggctcaagcgatcacaccactgcactccagcctggatgacagagtgagactctgcctcaaaaaagaaaaaaaaaacaacgaaagaaattttgcatcctcctctatgtaattttactcatcatgatatcacattttccatggcattatgaagtctttataaacataatttttaaaagctgcacaatatggccaggcgcggtggctcacgcctgtaatcccagcactttgggaggccgaggcaggcggatcacgaggtcaaaagatcaagaccatcctggtcaacatggtgaaaccccgtatctactaaaaatacaaaaattagctgggcatgatggtgcgtgcctgtagtcccagctacragggaggctgaggcaggagaatcgcttgaactcaggaggcggaggttgccgtgagctgagattgcacctggggacagagcgagactccatctcaaaaaaaaaaaaaaaaaaaagctgcacaatwtttcagcaaatggatgtacccccataatttactcaactattttttactgttggggaaaaaattacaagtagcttaaatgtccaacattttaatttatgttgcaggagaggctcccattctgcacaccaggataatttttaaacagtttaaaaccaaacttccatctccctccagacctgttgttgaattcccaaagtttgtggtttttttaaaatagctgaattaatatcgtagacttttattttagatttacctttcattttcactttttttcatttattgttattattatttatttatttattttagacagagactcgcttagtcacccaggctggagtgcagtgctctgcctcccgggttcaagtgattcttctgcctcagcctcccaagtagctaggactataggcatgcaccaccaggtctggctaatttttgtatttttagtagagatggggtttcaccatgttggccagactggtctcaaactcctgacctcaggtgatccacccaccttggcctcccaaagtgctgagattacaggcgtgagccaatgcacccagccattaattttttatttttaattattgtggatacatactagttgtacatatttatggggtacatgtgattacatgtataatgtccatgtggcatacaatgtataatgatcaaatcagggtaattaagctttccatcacctcaagcatttatcatttctttgtgttgggaatatttttagttattccatttttttaaggtatttggaactatataataaattattattaactgtagtcaccctgttgtgctaccaaacactagctctttttaattttttaaaaaatattttttgggatttgccaggaagatgttactaaaaagcattccagatccagaccccaagagaggggtcttggatctcatgcaagaaagaattttgggcaagtccatagagtaaagtgaaagtatgtttattaagaaagtaaaggaataaagaatggctactccataggcagagcagcaaacactagctcttattccttctatttaactaatttttgtaaccattaactatcccctcttttccccccgctctctgctacccttcccagcctctggtaaccatcattctacttttattattattattatttgagatagagtctcactctgttgcctagactggagtgcagtggtacagtcatagctcattgcaatcttgacctcctgggtttaagagatccccctaccttggcttctcaaagttctgggattacaagtgtgagccactgcacccagccagccattattctgctctctgtctctcagtttagaattgtttttagctcctacgtataatatcatagactttcccctaatttatcagagattgtaatagtgaaaaattataagcaaccaaagtatccatcaataatggataaatgaattgcagtgtacttatatgatagcctgctatctagtagttaaccagagatgaactatatttacatatatctgatttaggatttttcaacctcagtgctactgacattttggatctgataatttattgtgagggactggcttgcacttcataggacatttaacagcatccctggcctctatccagtaaatatcaatagcacttctccctcatcccccaatcatgacaaccaaaaatgtctccagacattgccagaggtacctgggcggcaaaatcgtccctggttgggaaccactgatctaaatgggaaccactgatctaaatgaatagatttcaaaaacataatgcagtgaaaaaaaaaaaaaaagcaagttataaatacgtacagtaatgggtaccaaaaaaaaaaaaaatagaacgaatgagtaagacctactatttgatagtacaacagggtgactatagtcaatgataacttaattatacatttaacatagagtgtaattggattgtttgtaactcgaaggataaatgcttgagaggatggataccccattctccatgatgtacttatttcacattacatgcctgtatcaaaacatctcatataccctataaatatatacacctactatgtacccacaaaaattaaaaatgaaaatgaaaaagaataaaatatataccgtgtggatgttacacatataaaaattttaaatatacaaaatactatacaggctgggcgcagtggctcacacctgtaatgccagcattttgggaggccaaggcgggtggatcacgaggtcaggagytcaagaccagcctggccaatatggtgaaaccctgtctctactaaaaattcaaaaattagctgggcgtgttggcacgcccctgtaatcccagctgctcgggaggctgaggcaggagaatcgcatgaaccctggaggtggaggttgcagtgagccgacatcgcaccactgcactccagcctaggtgacagagcaagactccgtctcaaaacaaaacaatacattatttatagatacatatatattcatttattcaacaaatatttattgaatgcctcctatgtgccaggccctattccaggtactggggatataataaatgaacccaaagtgtccttgtccttatagagcttacatgctaatgtaggagaaagaccgcaagccattatgtaatattagggggtggtaagtgctatgaagaaaaagcagtgtgtggggtagaggggtagagactgctcttctagatagattagtcaaggaaggcctttctaaggaagttttctttgaaaagagacctgaatgaagtgaaggagtgagacattcagttatttaggggaataacattccagcaaaaggacagacagcaaatacaagaaatagaaacagaaatatatatacatacagagagagagaaaagtgccgaagtatacttgagaaagcagtcacctctggggagcaagacaatggattgggatgggtggcagtggtcatcaaaggaaacattagctttctctacaatttttttttttttttttttttttgagatggagtctctctctgtcaccaggctggagtgtagtggcacgatctcagctcaccgcagcctccacctcccgggttcaagcgatgcccctgcctcagcctcctgagtagctgggactacaggcgcgtgccatcatacctggctaatcttttcgtattttagcacagacagggtttcaccatgttggccaggatggtctcgatctcctgacctgtgatctgccctcctcagcctcccaaagtgctgggattacatctctacaatatttttaaggtacatgataaacctatacacttttttgtcaattaaaaataaacaaataggccgggcacagtggctcacacctgtaatcccagcactttgggagaccgagatgggtgaatcacctgaggtcaggagtttgagaccaacctggccaacatggtgaaaccccatctctactacaaatacaaaaaattagcyggatgaggtggtgggcacctgtaatcccagctactcaaattaaaaataaataaatagccaggcacagtggctaatgcctgtaatcccagctacttgctgagataggaagattgcttgatcccaagagtcaaggctgcagtgagctgtgatcatgccacgcactctagcctaggcgacagagtgagaccctgtcttagaaaaagaaaaaaaagaaactatgcacagagatacttatgtgttgagtgagtgacataatggtgacatgatttgttacataaattgatggcaccctgtctgaactattaagaatggatcaaatcaagttgtataaaggacttgctttaattggataaacatttgcataccttgcaaaatcacgtaggtgatggggaactgtctctactctgtattattaatatgtaaacgttactaggagagagaataaaccaaataatcataacaaaaggcaaaataaaaatcattctggaatatcaaatgctaaagagagtcatagtgagaaggtaataaactttcactaaggttgaagcagagatgttaaaaaaagaaagataatggaaggcttcagggaggaggtatttgagttaagtcttaaagaatgaggattttttttctttttatggagtctcttttttttttgagamggagtcttgctctgtgcccaggttggaggtgcagtggcgcgatcctggcttactgcaagctccacctcctgggttcacgccattcatctgcctcagcctcctgagtacctgggacaacaggtacccrccaccacgcccagctaatttttttttttttttttttttttagkagagacggggtttcactgtgttagccaggatggtctcgatctcctgacctcgtgatccgcccgccttggcctcccaaagtgctgggattacaggcgtgagccaccgcacccggccaacggagtctcgctcttgtcgcccagcctggagtgcaatggcacaatcctggctcactgcaacctccgcctcctgggtaatacagactttgcaaaagttaaagaacttccctgggttctggttttctcatctgtaaaacaggattattaccttctataatagtaacaaaaggactcaataagaaaatgtatttaaagtgttagcatagcatttaatacatgctagataaattttaattgatgctttccttctggatcttcttttcctcgtatataaaatatatattatatgtatatttttatgtatttttagtacgtgttttatatgtatatgtactattaacataatacaactgtatgtacatatatatacatatatagagagagaccctgtctctgcatgtatgtatagaaagaattatacgagatcagtggcttcataatgatgttccatggagcctgcttcagagccaaaaaggaaggccaattgtgtagatctctgagcttctatcctccaatttatttatttttattttattttattttatttatttattgagatggagtcttgctcagtcgcccatgctggggcagctcactgcaacctccacctcccgggttcaagcaattctcctgcctcagcctcccgagtagctgggattacaggcacgtgccacaatgcccagctaatttttgtatttttagtagagacggggtttcaccatgttggccaagtgaactcctgacctcaagtgatctccccgccttggcctcccaaagtgctgggattacaggcatgagccactgtgcctggcctatcctccactttaatgaaggccatttttctttgaccccttctatattttagagttcctggtaaaagttttgtttgagaaaaagggatctgcaacctaaaaatatgcttaaaaacaaattagaaggctgggtgcggtggctcatgtctgtaatcccagcactttgggaggccaaggcagggggattatgaggtcaggagttcgagaccaacctggccaatatggtgaaaccccatctttactaaaaatacaaaaattagctgggtgtggtggcgcatgcctgtagtctcagctacttgggaggttgaggcaggagaatctcttcaacctgggaggcggaggttgtggtgagccgaggtcgcgccactgcacaccagcctgggcgacagagtgaaactctgttaaaaacaaacaaacaaattagagccaggtgttttggcatgtacttgtagtgctggctacttgggaggatgaagtgggaggatcatttgaacccaggagttcgagtccattctgggcaacaatgaaaccccatctcttaaaaaaaaaaaaaaaaaacactccccaaattagactagctaatcccttccaaccttaaaatactatgtatttatgattactattctatgttctcttatgaagaaatactcatgttttttatttttcatagttctcttgctatgagccctggtgaagaaatcttaaccttattacagacaataccatttgatatagaagaccttaagaaagaagcagctaatcttcccccagaggatggtaagtgatggaccaggatacagtggaagggttaaaaaaaaaaaattaaaatgttctactcagtctcacaggatcctctcctaagaggacttatgtgaatgtagaatggcagtattatgctttcttctttttcagatgaccagtggttagatctctcaccagatcagctggaccagctgctgcaggaagctgttggcaaaaaagaatcygagtctgtttcyaaggaggagaaggagcagaactatgacttaactsaagtctcagagagcatgaaagcyttcatatccaaagtctcaacccacaagggagcagagctgcctcggtaatttgtgttaaagtataaatatataaatagctagaacccaaatgttgaagtcatagtcattgccatttccactttttttttttttttttgagtaaatgagttgtactgcttgctttcttttttgtgcctagtatagtgataacttacttatttgaagtcagatttctagaagcctcatcctttgcaatccttgaaataagccagaaagatcaccctaaaaaccatcatccagaaccacacagggaaaccatatactttactctttagtagctttatgggctcaacatttaactttcaacaagttcagacctctgatctcccaccctgcaagcagattggatactgaaaaaggaattcatcagaggcagaaataataacagaaatatgaaactacatttggcaaataacaggaaaaacaggtagatagaattattacttgtaggctgggcgcggtggctcatgcctgtaatcccagtactttgggagaccgaggcaggcagatcacgaagtcaggagttcaaaaccagcctggccagcatggtgaaaccctatctctactaaaaatacaaaaattagccgggtatggtggcgcacgcctataatcccagctacttgaaaggctgaggcaggagaatcgcttgaccccggaaggcagaggttgcagtgagctgggatcgtgccactgcaccgcagcctgggtgacagagcaagactccgtctcaaaaaaaaaacaaaacaaaaaaaactgttacttgtgtatcaaatatatcattattagtgttgatgctcttgaacctgatgaaagatmtaaatttatatttggtattctctctttaagaaagcagggataagggaagatatgttcttgtttattttttaagctttagttcttaaaagaacaggctttatttaaattaactcaaataaataatggttttgctaatgctagatatcttattggggctagagagtgggtaggtccctaaatcagcataagctaaatgtacataaacaagatgcaatttttacttttcatttatcagactttcccatttctgttgtcctgcaaggccagtaaactcaaggatttttaaaacttaaactacaacttttcttgctgtgcctccttagaaattctatctttggtagctttcctaagaatggcaccactttagaaaagtttcraagagttgtatttagaataaattaattgtctttgtcctttaatattgcagaraaccttctgargctccaatcacttttgatgcagattcttttcttaattattttgataagattttaggtaagtagtggtgtgatgttgactttcattttgaaactgttagtagtatggctgttgctagagcattggkttatgagatatctcagaagccaaaatgtttgctttctcttcctggtttgagttgctttcaaccatgaattactacccatgaataattttgtagaggctgcctagcttagtgtttgacatatatagtagctgctcattaattttttttttttttttttgagacagtgtctcgctctgttgcccaggctggagtgcagtggcacgatctcggctcactgcaagctccgcctcctgggttcatgccattcttctgcctcagcctcctgagtaactgggactacaggcgcctgccaccacacccagctaatttttttgtatttttagtagagacggggtttcaccgtgttagccaggatggtctcgatctcctgacctcatgatccgcccatctcagcctaccaaagtgctgggattacaggcgtgagccaccgtgcccggcctcattaaatatttgagagtgactgaatgctgtgtgtttaaatagggttttaccttggctcccatattatattgttcttttttggaattactgtacttacaaatcagtaataaaaagataactcaaaaaataattataatatgtatatatgtacagaactgcagagagaaagattgggatacccggaaactgctaaaagatgcttacctctggggagagagtgagattggagacaatacttgtatggcttgaatgtttacatcaaaatgtattcatttattaggtatttttaaaaattttttaagaaaaatattttaattaattgaattcacttttttttaagctaaatcttttgattcagcttgtacgcttttccacaacattaaatgcacacatatctgccagcattaccatttgtagaagggatttttgtgaagtagactgactgtgtgtattagtctttttcygtgggtaacattctaattattttgagatgtgtagtaactaaawaataataataataataataataataataataattactaagtggctctttctttcttgggatctgtrtagggccaaggcctartgagtcagattctgatgatctggatgatgaagactttgaatgtttagatagtgatgatgacttggactttgaaacacacgaacctggcgaagaggcttccctgaaaggaacacttgataatctcaagtcatacatggcccagatggaccaggaactagcacacacctgcatcagcaaaagtttcaccactaggaaccaagtggtatgtgtgtttttaacctctttctctttctgagtctagtatgtcagatagctaaaaccatattttatcatagtttttctttttttggtgtgtgagatttgaaataaataagaatgttaattgttttcctaastctggtaggataaaggatcatagacttaattttccaaaacataagcttcattatattacttattctacgttatctatcaggatttaaaataaaaagtcatataatatgctcaaattagaatgcgattgtacactactacttcttaaatacattttttttcaaaagtagtttaaaaaaactacagcttaaatggattttaaaaaagagagggcacatgttctcaagaccttttgagactatgccttgggccacagtggattaaaacaaaataacataagtaaataaacaggatcttaaacattcaaataactttccagttttaacagtttattttgtatttttccctaatttagagccaaatttaggattcaccttccgtttatgttttcatcctagtttttaatgccaccactgtctaatcctaaacagaggtattatggaaagagcaagaaccctggagtcttatgggttagggtttgaagtctagctcagctgtccactgtgaatgtatctataaaccagtaatcctcatatcataaaattaacatgagaaccaaattagacagcagtaaaacctacaataggcctttaattaatgttaattctccttgctttgatcatctaaaccacttttaaaactatagtcacttccagaattgtcaaaatctagtagaaaccatacattagatttatctaaagcagtatttcttaaattttaatgcgaatataaaccaaaagatcatgttacaacatagattctgattaagtaggcctgggatgaagcttgagattttccttttttttattattattttgttttattttattattattattattattttatttgagatggaagtctccctctgtcacccaggctggagtacagtggcacgatcttggctcactgcaccctctgcctcctgggtttaagcaattctcctgcctcagcctcccaagtagctgggactacaggtgcgcaccaccgtgcctggctaatttttgtatatttagtagagacagggtttcaccatgttggccaggctagtctctggagctcctgacctcaagtgatccacccacctcagcctcccaaagtgctgggattacaggcatgagcgaccactcccagctgagtttttccatttctaataagccccaagcgatggagactctgctgctccatggacaatgctttgggtagcaaggacataaaagtctatcgagctgtaatctttcaaatcctttccccagcttgtggaatcagaggcccaactaacaatttagaatctttgtggttggaaccacaaagccttgtgtttttacttttaagctttttcactggggggaaagaaaggaacactcgcttctttcattttgaagaaaatttacattattatttcatttaatattcacttttatgtttgtttcttttaagactcttagacaagttataaatgtaccttcttaattctattagcccttgagctatttcaaaatagacatgcaatttattcgatttgcaggaatctttcctggagagaaatgtgttataacctttagaaccaagttttattatgtgtgctaggccatataacttgtagacttcattttcagtttatatcaccaaggataagaagtttcctttttaatttggaatgcaaatttacattgtggcttagttatctttttattgtaaccaccatgcaacctaatgatacattagcccataattttcttttccctctatgaataaggaacctgtatcccagactaccgataacaattcagatgaggaagatkctggtacgggagaatctgttatggcaccagtagatgtwgacctgaacctggtttcaaatatattggaatcctatagctcccaagctggactggcaggacctgcttccaatcttttacaaagcatgggagtgcagctgcctgacaacaccgrtcacagaccaacaagtaagccaacaaaaaattaaccagcacatttagcttctcttttttctttttaaataaatattgaatatgattctgttcatttctagtttagattactcatttrgtaaaaatgtttcttcattacaagttttacagattgacttctccatgagccccaaatgtggccctcttggcacaagtctttgtgatctcagctgtgggttatacacaggttttgaactcggcagggtagaatctagcccctagacaaccttgagatgaaattcacacacttcatgctaaagacataccctaccacaatatacccttggagtaattctaaatatttaaatttctcccttactgctattcatcctcagatcaaaatttcaagttgacaaatttggatttgaaaactsattcactttttcaatttttttaatgaggcayaacatgcatatggttaagtgcacaaatcttaagtgtacagtcagtgaatttttgcatgtatgtatgtacctgaagcaagatatagaacttatttacttgtaaataacagctatattgatatgtcacataccaaaaaatttaccctttaaattatacaattcagtggtttttagtatatttacaaaattgtgcaaccatccctaccatctaattctagaatattagaaaccccatactcactaatagtctctcattcccttctactcccagcccctagaaaccacwagtctactttctgtctctatggatttgcctattttggatatttcatacctgatactgtacttaattgttttaattaattaattggtttgatatttaatataactgatatatcttttgctaagatgaaatgtttatttcttaaaatgatgctcatattcctcctaaaataaatcaagtattatctatatatcataaaattcaccattaaaagcaaaaaaaaagtcttctttacagacagctccatatactgaccatgtttttataatctaggtctctggattcttctttattattgtatgcagcagagagatgcctttactatatcttaccctatccaagtaaaaacaatggaaatagtttcatactgttccctctccagtgaccaagggaggaattaggagaatggtgtagtagagttctcatctgagaacttactatcacgaactaataaaaactgaatatggccgggcatggtggtgggcgcctataatcccagctacttgggaggctgaggcaggagaatagcttgaacccgggagccggaggttgcagtgagccaagattgcgccattgcgctccagcctgagcgacaagagcgaaactccgtctcaaaaataaataaataaaaactaaatataccatatcccactccaatcctttgtcttcctagtgttcactgaaatgaactaaggaagaggataagtgttacacattgactaaagtaacacatcagatgatattgtgcaacattttaacattttaaataataattattttaaatatatttttattgtttgttttgaagctacatttctcatgttaaaaatggggccagaatgccgtcccagctcaactgtgagaaaaaggtttccccccatcgcacttgtggtacattaggtttatcttcattgaggattaaatattgggtagagaaagggtgataggcaaaaatataaatgaaatttttttttattctggttgccacggctgactgactttcagccaggctcacaagattttacctgtttttctattctgcatcatggacccagatgggttctatttatccttagcaccttcataatttattgcccatgtatatattctcaggtcaggtaggtcctgtaccaaagtttcttttatttatctgccattttcagtattccaggcctgctctcttctgcctcagctttcagatatccttggggttctacagcaaagctcttttcccactcactactgagaagcaaagttcaatgttgcagctcctgctgttagccactctcatcttttcttttccaaaaacacattaatcaaaaaacaaacagttactccatggtaagtttgggaaactcataaccaggaattccgcacactcccctttctatcagtattttcagattggggatgtgtacacatgcgctcacaaacacacccacatagagatagaaaagattgggagatggtaatacacatggaccctgaactgttttcttctaactgcaagatatgaagaaatctcaggacctctcttttgtgagtgcttttcccttctgcatgctgggttcagcccaggtaaaggcaagctgccaatctaacaagacaatcaagtcccatcacatattatccctcaacatttcctgatgaaggcactttgatttccccaaagcaatgatggtttgctggcagtggagagagcaatgaccttttgagatcaaaaggaaattcagtgctttaacttttctagttttagaatctctttagtgctatgggactttgggacttagtcctatgggactttgacatgtaaataaccttagggtctctggagcttttgtctttaatcacaaataagtccctagaatcttctgaagatatgattatttcctcttttcagcaagacctctaacattcctcctgcacattgcttcagttgttacactgacttgaaacctggacttaaatgtttaattgtcaccaatagggatcctttcccctacccccaaattctcaccttgtaaaattttctcaattcacaggacagaaaaagacatcagaacaaaggtgtggaaatttcttttattttccccaaataaactcttctcccttatggcatcatatatgaatgatgagaaatcctaaatttagtttattccataaagtttaagaaataggtcaggtttggcatctgtttatctccaccaatccctttgttaatcaacacgttgtggatgtgcaaatgccagcaactgttttatttaggaaaacaggcatggcaaagcaatagtcttttccctgggtcacaaactgagcatgtgacagagctgaaaacagcgaaaaagatttactgtctggagtcccattgggattctacttcctcaacagagcctcagggcatctgatttattataaagtactctgagtcataatgacttaattgtgacttttatttaactagcatgttcatgtaactagaatgcacctgtacatgaattttaaaatgtcatactgtgctatttttcttaattctgtaagggtaacaagtaactcagtaatgacttaaaacttgctatatattttcaatactaagataaaagttttaaccaaacttacaacaggcacattttggcagttagtgtaaacacaacattaacaagccatatgccagaagatgtttgcttccaaggccttagagaaaatgactgaacaagggcctacatccaaactaatgcttcccccttccccctgatttttgacagttgacagctcatcagttttcttctcacactggcttttttgattgcccattggtaggaatttcttccattaacactgctgatagaagtgtcttactgtaggctcaccctttgctctgcccttctgaggtccttctgcagcttatcttttgtcacttctcctttgtcaactgatctctagtttgtccctcaggaataccaaggagcgatctaagtgacttgatccgggctaagcaggcagggaagaacaggtctgtttttccacccactccttaatcagttggtgggagatggctaacttagggggcagccagaatgggaaagtcccattctgttgctgagtataggggccctttctcttcagggctgtggctacctcatcatgactgaaccaggcagctgtctctaattctctcaagttcacctggatctgaaagacataaggaagaaaaggatgtaaggtcaggagctacaaaatttagaatactatggccaaaggtcagaaaatgattctagaactaagcaatcttagaagataatacctgggatcttcaggttaggtgaaagtcagttctagatactgcccagaagcaaaagaggcataattaagaaatgagagttttatatgtgtgtgtgtgtgtgtgtatatatatatatatttttttttttttagacggagtctctctctgttgcccaggctggagtgcagtggcgctatcttggctcaatgcaagctccacctcccaggttcacgccattctcctgcctcagcctcctgagtagctgggactacaggcgcccgccaccatgcccggctaattttttgtattttttagtagagacagggtttcaccgtgtcagccaggatggtctcgatctcctgatcttgtgatccacccgccttggccccccaaagtgctgggattacaggtgtgagccactgtgcccggccgagttaaatatatttctaacatagtaaaaaaaaaaagataagatacattaaataaatcctggaagtacaaatactaaaatgttaagagtggttaacattgagaataaattatgaataatacctatttttccttgtgtctctattgattgtataaatttttcaattaaaaaagaacatacaaatattactttttttttttttgagatggagttttgctctttttacccaggctagagggcaatggtgtgatcttggctcactgcaacctcccctcccaggttcaaatgattctcctgcctcagcctcccgagtagctgggattacaggcacccgccaccacacctggctaatttctttgtatttttagtagagacggggtttcaccatgttggacaggatgtttttgaactcctgacctcaggtgatccacctgcctcggcctcccaaagtgttgagattacaggcgtgagccactgtgcccagccactcttttttttttttttttaaagggtaagggttaatgatagtcaaaagcatagtctcatctttgcaagaagcaaagtaatgcaaacttcatcccaaggaagctgaaatagattagatattctataaaaaccaaaacatacaataggcaaactttggcaggcagagaccatcagtcagtgatgctagagaagtgcaagatgagattggataaaacaatgtctagccgggcatggtggctcatgcccataatcccaacactttgggaggccaaggtgggaggatcacctgaggtcaggagttcgagaccagcctggccaacatggtgaaacccccatctctaataaaaatacaaaaattagccgggcatgctggcaggcacctgtaatcccagccactcgggaggctgaggcaggagaattgcttgaacctgggaggcgaaggttgcagtgagctgagattgtgccactgcactccagcctgggcgacaagaatgagactccatctcaaaaaaaaaaaaaaaaaaaaaagacaacgtcttaagtttctttcaactacaagtacctatagttttatatttttagttcccagcatcctgactgacttgagcaataagaccaatcctgcagtcagtcattaaatgatgcctgattgtgcgcctactatatgtaagacactcttaactcctgacaataaaaggtaaattgtcttatataaacagtgttgggaaaattggatatccacatgcaaaagaatgaaatcggaccgttatcttacatcatatgcaaaaaccaacttaaaatggattaaagacttaaatataaaacctgaaacaataaaattcttaggagaaaacataaaggaataaatttctagacattagactgggcagtggtctcttagatatgataccaaagcacaggcaagaaaagcaaagatagacaagtagggattctatcaaactaaagcttctgcagagtcagggaatcaatcaacagagtgaagagacaacctgcagaatgggagaaaatatttgcagaccctctatcttataaggagttaatatccaaaatatataaggaacttctacaacttaataccaaaaaataaataagccaatttaaaaatgggcaaagaatctgaatagacatttctccaaagaaggtattcaaatggccaacaggtatgtgaaaaggtgctcaacatcactaatcatcagggaaatgcaaatgaaaacctcataccttctttgatggctactattaactcataccttctttaatggctaccattaaaaaagtacaacggacagcaagtattggtaaggatgtagagaaaagggaacccatgtacactgttgtggggaatgtaagttggtgcacctactatggaaaaaaatatggaggttcctcaaaaaattaaaaatagaattaccctttgatctagcatcccacttctggattgaaatctagatcttgaagagatatctgcactcccatgttcactgcagtattcacaatggatgaatggataaagaaaatgtggtatatactataatagaatattattcagccttaaaaaggaaggaaatcctgcagttgcaacaagatagataggcccaaaggacatgctaagtgaaataagccagacacagaaagacaaatattgcatgatctcacttatatgtggaatctaaaatagtcaaacttacagaagcagagagtagaatggtggttgccaggggctgaagggaggggaaaatggaaaaagttgcatgccaggggctgaagggagggtggccactggtcaaagggtaccaggtttcagtcatgcaaaataagttttgaagat

SEQ ID NO: 6790 - DNA, 54334 bp, Homo sapiens
attcttttgtctggaatatggaaggcaactttccccaggggttccttcaggagaacttacaaggtcatgggccacaagtttccttcccatagactttgctatttctggctcttcattggagtgcagtagatctgggggtcactgaagaagcttgttgggatgggcatactgtgaaaagggagctcactggtggcagaaatggggtaatcttcaccccagtgtctacacttggacggcatattaccaaaaaccacatcccagtgaagccatgggaccaattcgccaagtgggttaaaaagcttcctgatgaagctgagcgtggtggctcacgcctgtaatcccaggactctgggaggccgaggccggcggatcacaaggtcaggagatcaagaccatcctggctaacagggtgaaaccccgtctctactaaaaatacaaaaaaattatctgggcatggtggcgggcgcctgtagtcccagctgaggcaggagaatggcgtgaacccaggaggtggaggttgcagtgagccgagatcacgccactgcactccagcctggggcgagagagcgagactccatctcaaaaaaaaaaaaaaaaaaaaaaaagcttccagatgaagaggtgcttctggctttgatgggctataaggcttgtcatgtggttataaaattcatctaataggtgctgtcactcaaagattacctttggaattctctccaggccaaatggtatcactccattctactggtgtcagctgcttgaaatagtgtagacacagagaattctgggacccgtgtcgctcagaaacaatgtcaaagtcctggctgaaggtatctacattacccacgaattgctgtatatgagtggaatgtacaagcatggatgcaacagcaagagaactaaatttgttttgtgcttcaaagtacacagtttataaagacttctatattctattatctaaatcctaaaacagtccttaaagtcagcagggcaggcattgctatcaacactttggagatttgcagataggtaaactgagtctcaaaagcgacttgttcagaaccatatactagtaagttgctgagccctgctaaacccagggactttattcacatttttttgtttgtttgagacagagtcttgctctgttgcccaggctggagtgcagtggcgtgatcttggctcactgcaacctccacttcccaggtacaagtgattctcctgcctcagcctcccgagtagctggaattataggcacatgccaccatgcccggctaatttttgtatttttagtagagacagtgtttcaccatgttggccaggctggtctcgaactcctgacttcaggtgatctgcccgcctcagtctcccaaagtgttgggattacaggcattagccaccacgcccggctgacactgctttgtcgatggcatcgacaagaggaaaagtcaagtgccagtaggagcttggggacatggagaaaggtactggacacaagataatcaggagatgccacttgattaccacagttgcaatttcttgagcaagtttaaacatcataagratgcagagaactttttgagaacatttctcaagccgtgttgcataagctgtgctcctggggccaatacgggttgatccacacacwtggggaatgcttaaccctaagcaggagaaagcaatcggattttgcccaggtaggtgaccaaaggtgaataaagcagtccactggtggccttgaacaatcagagatgtgagacttgtcacatgatgaccctcctttagcacagtcaaacccctgctgatcacaagcctcctccagaatccaaaattacccaatgggaaccatataccatctcctgttgcttttcctgcttctctggaccatactgttagcttcctgctcatcaaccctatcctaaggtccagttatgcaaggcaggggtctttttgcaattatttaaaaggcttgtaggtgagaggtagtggctcccttttcctttgtcatcagcttatctaacataaggtggttgattctggtacagttcttcctcctttttcttttttttttctggagagtttccaaatttattgcttatcaatggactcatcttggaaattgagctgtaaaacaccaggatagaggatagtcttggttgccaaatctgttcccccaccagggcagtgttgtatacttccaaaactttctaggtctcctccaaatgactcaagggatgggaatttcaccacctctcatgggaggttgttttatagcctcttacatcttacccatgatgaaagttctgatgaaacatttttttcccctttggttcattcattacccttagataatcccctaaagagcaccttcacaatccctctccttctttggggcttatgccttcaactatctgcacatggctgtcaggaccccatcccacacacatgcatctgcacatggctgtcaggaccccatcccacacacatgcacctgcactccttagctcttcagccaggcctacccacatacaattcttttcatctttcctcatacatcaaaacctcaagtgaattggaagcgggattatggctctcttctcaagattttctcacgtcagctgcatcccttctcctcaaccacatgccaggtttgtgtatgccaatagccattcaccaatggaaatgaggtttttctggaatgctgtgttctatagttaaaaaaaaaaaagattcctcctacccatagcttatatctaggttggatcaatatttatacaaactataataaggaggaaaaatctaaaagaagtctgggactaccttaaatctccaaccccccaagaaacatttaaactacaaataaaaatctcaaaataatatatttcccttaaacataggctatgaattaataaaataaattcaatcaccttttggtaaaggaagcatgaaaagattgactactcatttctttatggatgaaaaattagcatggatgagtgccccaaatgaaaaagaacccttccttttcttcttattttgtcatttccttcccactgacttggtcagaagccacctccttttgttcttcaaccactctgaatagctggtagtttccatggtctctgaagggattcacgcacaccacagttctcggcggcaatagggaccaccagaggtcctcaccctcgttatgcaacctcaggccttccccctcctctgttttctcccaactgcactaagggccagtcttctacaaccctaggggcatcacagacatcttcagagccccaagaccccacctatcattcctatgcttagaaggaacctcttcttttccaaaccttcccatccaaacctgatggggctcttccttcccaaacctcgcccatccatcaagatctagcttctgtttcatttcctccagaggaagcttccttttcccctaaacttcataatgtttagtgtctataccattaaaataggctacctcacattattcatgcctccatttgctgctgctgcttttttttttttttttttttggaaacaagctctttctctgtcaccaaggctggagtgcaatggcatgaacacggctcactgcagccctgacctcccgggctcaggcaatcctcctgcctcagcctcctgtgtatttgggatcacagacatgcattaccatgcccagctaattttttgatttttttgtagagacagggtctcactttgttgcccaggctggtcttgaactcctagtctcaagctcggcctcccaaagtgctgatgttagccactgtgcctggcccatttgctccattttttaaagttttattttatttttaattgataaataataattctatatacttatgaggtacaatgtgacattttgatacatgtatacattgtggagtgatcaaatcaggtgaattagcatattcattacttcaaatatttatcatttctttgtagtaagaactttttaaatcctctctgttagctattttgaagtacacagtacctcattatcaactgtagtcaccacactgtgcaacagaacaacagaacatatttctcttgcctgattgaaagcttttatccatcgaccactctcttcccctctcacacacccctcacccccagcctctggtaaccaccattctactctctacttctacgagttcaatttttttagtttccacatataagtgagagcatagggcatctgtctcattatgcctggcttatttcacttaacataatgttctctaggtttatctatgttgtcgtaaatgacagaattttctgtgttttttttttcaaggctgaatatattatattgtgcatatataccacatcttttaaatcctttcgtcagttgatggatacttagattgtttccatatcttggctattattaataatcctgcaatgaacatgggagaggagacatctattcaacacactgatttcaattcctttgagattcttggaacatatggtaattctatttttagttttttgaggaacctccatactgttttccaagatgtccgtactaatttacaatacagccaagcatacaaggggccccttttctccacagccttgccaacacttgttatctttctttctttcttttttcttgagacagggtcttgctctgttgctcaggctggagtgcagtggtgtgatttcagctgactgcagcctcaacgcctcagcctccccagctcaagtggttctcccaccccagccacctgagtagcagctgggactacatgcacgcaccccatgcctggctaatttttgttgttttgttgttgttttgtagaggcggtgtttcaccatgttgcccgggctggtcttgaactcctgagctcaagtgatcctcctgccctggcctcccaaagtgctggaattacaggtgtgggcaaccacacccagccaagatctctttatagggacactcaagactgattattttgacaaggctgatgttttgctgaatgtgaaggtgggcttcaggccagtgagtagccctgggtggggagccaggagttaggagaggaaagtctctgctctagcctcaaggaggagaaactgcagggtgaccaccacaacctgtgggatcagccccattctggggcatcatgcatgcctataggggagctggagcaggtgatcagaagctggagcagggcataggcagggatgtgcttgggggcccatgacacagttttaattcagagacctgcagttataaagaaagcagattaatcctgatatcatggatagttccactttgtgctcaagtttacgattctaggcccaggactaagcagagccatgggaaaaggttcccagctcagctgggtccagatatccactcccctttagtcccacatcatactgtccttgtcctttgttctccgatccagcctcccaaccaggtcttagcctttttcccatactgagccccacacccttaaggaaccccctctcttggtgtatctcacctgtaagccatggaaaggcaagcttcagaacaaggaatatagacaacctaggactctgtggtcctctcccctgccccctcagtgccctgaagtatgtgagactggggttcctcctgccactgtcctttccccacggctgagagggtgaagtgagggaagggagctgcccatctctgctccaccaggggacagctgaaggtgagacaggacaggagcctcagacccattgactgaacctgggaggtgggcagagcctgggagggggacagcgctcttcagctttcctcccagccttggtccccaccccaatccatgtcggcccttttaggagcttttagtggaaatgagctcagacccgcagcacaggcccccggctcccctcctgtctcagctcctcccattgctctttgatcgtctcttctgtccgacctctgggccatctctccaccaggcacatctgcgagcagcccccttcatccccagcatcgccttttcctcccgtttctccttccactcccagctccacatcctcctcctattctcccctctcccctcttcaaacccccaccttccagttccctcacctcccctttcggctggtcccctggggcttgcagcaagagggagagagagctcctgacaggattgatggtccttccccaccctgtcctctcatccgctccctccccagcaggcacagacatccccctacaaaaggcaggagcccaggctgtgtggaaacagctgctctcagacgcctttccatttgctctctgctggctaggctgggctgtgcctctgctccctcttcctctagctgagagtgggcacctggggtaccgggcccccccacctcattccccatgaatgctgtgggaagtcctgaggggcaggagctgcaaaagctggggagtggagcctgggacaaccccgcctacagtggtcccccttccccacacgggacgctgagagtctgcaccatctccagcacggggcctctccagccccaacccaagaagcctgaagatgaaccccaggagacggcatacaggacccaggtrtccagctgctgcctccatatctgtcaaggcatcagaggtaccagatagggggacagttctcctgggatattagaatcaggaggagtcaccaaaagcttttgggcagggggtgggggtggaatgtgatctgaagaagaggtgacctttcggtgtcactttggggtgtatgaattgcccatggtagtgctgcatgacccagaacacagaggccagctgagcggtctacyggttgtgggagcctggcatggtcatcacctggggatccagagaggtatgtgggagctggtttgagggaggacatggatgtgatgatgycctagactaccccacctggaacaggtgcytcctttccatgccttcattctctacaagccagggccttcacccctgtcgacctcagggagctgatgggaagagcaagcatgggtgtgggtacagtagccagattcagccaaggatgaaggtgatgggcaaggaagggcaggggtkgaaaggggctaaagtccagagacagatggrtggggatgactgggaggaacactgccactgagcatcccaggcatctctcccatgccccttaggactttggggaacaaccctgactgagaacacagctgagaaccgggaactttatatcaagaccaccctgagggagctgttggtatatattgtgttcctggtggacatctgtctacgtgagtagcatctgtgtttgtgtacatctgtctgtgagaaacatctatgtgtgcactatatrtataaacattcctgtgggcaacatctgtggagcgagcatctatctgtgtaagcaggctatatccgggaactttagataacaatattccaatcccatctatttacctttgcagcttaagatattttgtttaaaaggaatttgtcagtagaggaaggcagtttggtcaagaattacaaggggaaaccagtttttggcagccattgttttctattggctgaaaaggtgaaaggtgaaaatattttacccttctgtagagagtgggctggcacggtggctcacgcctgtaatcccagcactttgggaggccgaagtgggcacatcacctgaggtcaggagttttgagaccagcttggccaacatggcgaaaccctgtctctactaaaaatacaaaaattagctgggtggcaggtgcctgtaatcccagctactcaggaggctgaggcaggagaatcgcttraacccaggagcagaggttgcagtgagccaagatcgtgccactacactccagcctgggggacagagcaagactctgtctctctgtctccaaaaaaaaaaaagagtggaaaaccactcccttctgtttggaaagatagtttggtgggcttcacgtagttattatactatatccgatgcatgtttctttagaggcagagaaaaagatggaagaaaaaagagaggaagtaaaagatccaggcgaccttagatctcagatccctgttaagagagggagggaaacacatggtatggtgatggtcccatgtgagagaccaccatgtcacatgccattggaggaagcttattgaggctctagctatagacacaaactgagaaattttgatctctaagttgagagaagcaagtgaaaagataggagggcgactgtgggaagatagagtcaaagaacygtaaataataataaaattggaccaaacagatgctattaaacttgtaggtaatgacagcaactttgtatttggtttattacttctttcaaaagttgcacaagtgatgtttgcctagtttaatatagttgtgtgtggggttgtgttttgattaaagctgtaggttgaatcgtacaactaagatgccctcattagtaggtgttctaggctccgcaatactctgttcttgtcagggtgcataaatcttttgaaagtggagtcaaagagtctcataacattaatgttgatgaaatgttgtcttattttttgagccacccacatttgtgcaagccctctaggaaagctggcagaaagcactttgttctggctgtgctctatcggaactcattccatgctggacagaggggacagtcctctgtgtttgtcactggccactctgcagggagtgaaaggacacagtgcatgtgaggaacaacggccggcccaatgtacatattgtggggccctttcaattcctttcagcaaatggctgtcagaaattcatttgttgacgtatcgattatttttgtcctaaccatctgctagcaaggagaagtcatctcctttttcagatcccgtgacagcagctgaaacccacaggcagagcctttctctataaatgacttaaacgtctctctttccagattagcctctggaacaggactgtttctagctccccagagttacagtgaaccatttctaactccattgtatggagctggaaagggtggaagcttgggttctggaagtccaggagtccaatccactcatgttctctgctttctaagatctcagtgcactgatgcattgccagatggtctgtgacttgccaaaatctgagtcacaggcttcgttcagtaattacagagtccttgagcagacaggggtttagagctcatctaattttaggatgcagaatacgtggartcctttctctgtgatccttcccatggtgctctgtcaggtggccaaccagcccaacctggggagtgtcagcggggctgtcactgtttcatgaggcaacccattctactattgggcagctctgtttccttcctcttatggagccacctcctctgagccagacgttggactgagaaacacatagataacagacacttgggcctttcccctcagaggctcacttccttttcagaactttcttctattaagccaactactgaggtgttcctgttactctctgaagtgacaacctttcaactgtttgaatgaatatagcttgcccttggtcatctgttctctaggttaaataacttctattttatcatggtacttttcttaaactagtcattcatratactatggttttcagagatggtattatgtagggattgaaggcatgggctccaaatttgcacaggtttgggtcaaacactgtgcactgccattcaccatctgagggccctcaagcaatttgcttaacttctttgaatttcagtttcctcatcgtacttacccaatccaataggattatgtgagataatagccatgaaatcatcaactcagtgcctggcatatattaaaagcaatttcagaatgctctccatactggttgcctgcctgcagacttcatctatgtgatgcctggcactggacaaaatatgccacggacaatctgaccagcacagagtactgtgatgccattatttctgttgtacccagatttgggggatctgtgaggaaatgcagaggaagtgatatcggagctaaaacctgagagatatggaggatttatccccttgaaagggaggtgaatagaaagaaagtctctgggaagaggggagagcatgtgccaaggcccaaaagggacagagggcacagtttggttaaagtgcatcaacgtggctggagcagagagtttgagaagcaaagtggtaaaagacgacaagtctggccttataagaaggggccgatcatgaggggccttataaggcatgagaaagaatttggactttattctgagggggacagggagagctattgaaaagttttaagcataggagtgacatgacaaattttaagttctcctgaggagagggcagaagtataaaccttgggtcacagaggtatctctgggaaagttgagtaggggagatgatagtcctgtgctaaggatattaatgggatttttaaaaacaaaaaccttaccagggccactgagtcaatctggtggcagtatagcatgctggttaagcagtgaggctctgaagtcgactatgtgggttcaaggtctggcgcttccccaattatcagctgtgtgatcctgagcaagtttgctaacctctcttatccttggacaatgatcatacccacctgagaagattcttaagcaggttaaataaaatagctcactaatatgcttagcacagtgtctgtctggcacatggtaaatagtgcctattgtcttcaagtcacagcaggcactgtaaaactataaatgtggcatcataacccagccagcagtggagggtgaggaaggaagaattaatctgatacctttaaacctcggaaaacctccaagtcctgtggaattgcactcttaataaagaccctgaaatccttagactacctgaaaatgtgccatttaactgccttgggccttgagaattaaagtccrcacccacaaagtgccggccccacaagaactttttatgaaagagaattaggaggccttcacattctgatgattcctacgacatctagtmagataatactmatactagtttcctagcccctgcctctacctgcctcttcctttcagacatattttcaggcgacatggagccttggaatggcctcaggagggccacttcggtgctctccaaggtcctggcctcaccccgctgatgtctcagctctccattaggctccctgagctctggccaactgcatctagaccataggttctcagtggggacgatgtagcccccaagagtgtaaaaatagtttctccaagggcaaaaagaatgctttaggtattacaatggcttttgggccactgaagagtcacggtacataagcaaatgtagagtctgtctgcagtatcrgaattgggagtgattaggaagaaaatgtctaaagagacttttggggagacggataatgcaaaaaaggttaagaaacactgaaccagatccacttaatttggctagtcagtatgctgactgagctctcctgcctaaggattgggaatacacgttataagcctgaaagctggcaccaagcggggtggctgttgtgttgctctatcaggatgctgttttctaagaactggagtgacgtgcagttggacatgcagctgtgccagtgtgcttttccatgtcagttcccatgaccgggttcaaatgctccaggacctgtgtttattattaggtaaacacagtggcatgatgaaaacataaaaacattggagtcagacacactggattcaaatactagctcctctacttcctggctttgtgaccttgaacaattgttctaccaataaggataataacatttatcttctggagataacatgcataaagaaccaaacacaatcactggtagtagttatctttgtattatctagtcgaaaatcaaaaccctcacctggtcctctagactgttcattaaaaaaatacctttcaagagagaagccaatctgaaaaggttacatactgtgtaattccaactatatgccatggtggaaaagacagaactatggagatactaaaagttgtcagtggcttccaggggttggggaaagagaaggacgaataggtaaagcacagaggatttttagggcagtgaaactactctgtatggtgaatacctgtcattttacgtaaaacccacacaatgtacaataccaagagtaaaacctaaggtacactgtggacttcaggtaatagtcatgtgtcaatgtaggtccattgtataacaaaggtaccaccctggtgttggatgttgatagcaggggaggctgtacttatgtgaggacaggggatctatgggaaatctctgcacctttcattcaattttgctgtgaacctaaaattactctaaaaaaataaagtgggctgggcacggtggctcatgcctgtaatcccagcactttgggagactgaactggacagactgcctgaggccaggagttcgagaccagcctggccaacatggtgaaaccccatctctattaaaaatacaaaaattagccaggcgtgatggcgggcacctgtaatcccagctactcaggaggctgagacaggagaatcacttgaacctgggaggcggaggttgcagtgagctgagatcatgccactgccctccagactgggtgacagagaaagactctgtctcaaaaaataaataaataaataaataaagtttatcttaaaaagtgtattaaaaacaacttttcagtgctgcttgtggaaacttggaaaaaataactttcatgattgcagttaataataatgtattatatctttcaaaatagctaaaagagatgattttaaatattctcaacacaaagaaacatttgagatgatggatatgttaattagcctgatttgatcattccatgatgtatacatctgaagaaacattacattgcaccccataaagatacagagtgagccgggcgccgtggctcatgcctgtaatcccagaacttcggcagaccgaggcgggtggaccacctgagatcaggagttcgagaccagcctggccaacatggcaaaacccctactctactaaaaatacaaaaattagtcgcgtgtggtggcacgctcctgtagtcccagctactcaggaagctgaggcaagagaatcgcttgaacctgggaggtggaggttgcagtgagccgagatcgtgccactgtactccagcctgggcgacagagcgagactccatctcaaaaataaaataaaataaaagccgtgattatttgtcaattaaaagtaaatcaataaataacataaaattacctttcaaaattttagttggctccacatatagggatagtattatttgagtagcatcctttaagtgacatcagacctttaagtgaaagtactttccctggaagccctcagtttatcacaaccgccaccaccaccatcatcattattaacagcacaaacaacaaacctttattgaataatttttcaatgcacctagcactatattatgtactttatctcactgactacttccaatgactctatgaaattggttctgcctatcactcccattttacaaatcagaaagatttagaaaagtcaaacagcttgctcaaggccactcatgcaagcaagtgaagaaagaggaatccaactcagcaattggttgcctgatttgaatcccgaggcttttaaccactggagtctactatggcctctctatctggaaatgtattgctcataaatttactaatacccatcaacatcttagcaaggaccactccgtgccctaccctaatagaagcagagtattgagaaattctactagctaactactattctttctttttattggtgtatttaaaagatgatataaaaacattaaagaatattttaaaatatagttggctaccactacattaaagaatttttcatttttcttattaccggtgtttatgcatacattcttacctagttgtattatattgtatactttcatcatttataacatttcatcatatttctaagtagtyttttttttttgagacagagtctggttctttcacccaggctggagtgcagtgtcctgcctcagcctcccgtgtacctgggattacaggcgcccacsaccatgcccggctartttttgtatttttagtagagacggggtttcaccgtgttgcccaggctggtctggaactcctgacctcaagtgatcggcccacctcggcctcccaaaatgttgggattacaggcgtgagccaccgtagtttttgtttttgttgttgttgttgttgttttgagaccgggccttgctctgttgctcaggctgttatgcggtggtgtaacctcagctcactccagcctcaaactctcaggtgagcctcccacctcagccctaaaagtaactgggtctacaggcatgcaccaccacacctggttaatttttgtatttttcatagagacggggcttccccgtgttgcccagtctggtctcgaactcctgggctcaagccttccaaagtgctaggattacaggcgtgagccactgtgcctggcctctcagtagttttcatatttccttccttccttccttccttccttccttccttccttscttccttccctccctccctccctccctgcctgcctgcctgcctgcctgccttcttgcttgcttgctttccttctttctttctttccttccttcctccctccctccctccctccctccctccctccctccctccctccctccctcccttctttctttctttctttctttctttctttctttctttctttctttctttctttctttctttctttctttctttctttctttctttctttcttttctcactctgttgcccaggctggagtgcagtggcacgatttcagctcactacagctcaacctcctaggctcaagcaatcctcccacttcaacctctcaagtagctgggactacagggacacaccaccacaccctgctaatgttaaattttttgtagagatggggtgttgctatattttcttttcttttcttttcttttttttttgagacagagtctcgctctgtcacccaggctggtgtgcagtggcgcgatctcggctcactacaacttctgcctcctggattcaagcaattctcctgcctcagcctcccaagtagctgggattacaggcatgtgccaccacgcctggttaatttttttgtatttttagtagagatgaggtttcaccatattggccaggctggtctcaaactcctgacrttgtgatccacccacctcgacctcccaaagtgctgggattacaggcgtgagccactgtgcctgtgtcgggtgttgctatattttctaggctgatcttcaactcctgagctcaagtcatccctctgcctcagtttcccaaagtgctggaattacaggcgtgagccaccatgcccagccagtttttatatttttattttaaggactacagtcacactgcaattaactaaaacatttctctggttgtttcagtatttgcctatcatggtaaatgtatctatagctgcagcttttttttcccacttctttaaattatttccttgggaattgataaggagagagattaccacgagggcaaaagatagaaatatctccttagtatttgctatgtgttgtcattttgcctctgtaagggattatacaaacttattatgccactagtgctataagatcacatcaattttgtcacaacctcatcaaaattggatgttctcattcataatttttattattaaataggtataagatggtacaactcacattaatttacttgccttttattaccaatgaggttggacacttttctcatgctttaatttataatgtgtatctatttttgtgtaaattgcatgagagatgttttcagggggacaaaggaggaaagggaaagtggggaacttggaccattagaccctaggtgaggaatcaaccaccagcgacctcatttccaagatctgggctcttgggagtggaaagaatagccaacaaagttagccatcacctgcacagcaatttggcaggggacaagccctagtagactatcatggtcaaccatactgaccatgtttcttctcccttatgctttattctaggaactggtggacctataatccaagactatttggaatctcatctggctaaaatagagttatctttttcatgcaggcaatatgggtgacccatcaattgtctgataataataatgtaaattgtgcaatcctttaaaccttacacagagatttcacatgtatcatctcatttgatcctgacgacaatcctgtaatggctcaatatttttctttctttccacaggttagggaaatgttattactgtcattatgaatagtttaggaatgattaatcactcagagctctttctgagggatggagtcagtcctgtcccagctattcctcagcagagaaagtgctggagaattatcttcctggctctcccttcccactgggcccacaccatcatcatgatatttatgaaagggcttccagccctttgtcttcttggagggattgctgtagccttttgttgatggaggaaacattgaaggtctttgtgtagaaataatggctgtttgttttaggagacattattgttatctcaaaggtgcacctgggactagccctgtataggagaggctctaagccaggaaatggctgggtctggtcaccatggagctggggaggagggcagagaccctcaacctttaatgcctaatggctacatgccaattaatatcaattggatgctcttaatccatcactagttgtaaagaaatgcatgcctctctttactctgctttcttttagtggatttcaaggttctatccatagattggtggaattgcactaataggagaggttgaagtgagcttgtcaagaaagcttgacagtatttctagaatcaacaaagaaaggagcagaaatatattggaggttcagaaagcgtctgtggctgagttcctgtgtggctgtaatgatgtcagaagatactttgtcatatagaaccacgattttagtgaaggcacagttgtataatggaaagagcgtgtgacctggaataaggtggtctgatccaaatgatggtgctaccagttattagccacgcatctttggcaaataggtcaagatacttaaatcattctaaaccttgattcctcaagtgagaataacatctgcttttgtgaggttggtggaaaacaaattaggtatttagtagtacagtgcttggagtataataggctttcaataaatattagttgccattccctgtcaagatataaattaggaaaatattgaaawacatctcagccagcctyagtggctcacgcctgtaatcccaaaactttgggaggctgaggcaggtggatcacctgaggtggggaattcaagaccagcctgggcaacatggtgaaaccccatctctactaaaaatacaagaatcagatgggcacagcggtgtgtgcctgtaatcccagctactcgggaagctgaggcaggagaatcacttgaaccccagaggtggaggttgcagtgagccgagatcacgccactgtactcagcctgggcgacagagtgagattccatctaaaaaaaaaaaaaagatagagagagagaaaaaaagaaaagaaaaacaggctgggtgcggtggctcacgcctgtaatcccagcactttgggaggccaaggtgggtggatcacgaggttagtagatcgagaccatcctggctaacacggtgaaaccccatctctactaaaaatacaaaaaaattagctgggtgtggtggcagatgcctgtagtcccagctactcgggaggctgaggcaggagaatggtatgaacctaggaggtggagcatgcagtgagccgagatcacgccactgcactccaacctgggtgacagagcaagattctgcctaaaaaaaaaaaaaaaagaaaagaaaaacatctcaatactctggattgttgtagatgaggccaggctggagtactgctgatgtaagtggctagcaaaagagcatataactcgtattacaaggcgtgagtttgagcacaagctctgcctcttgccctgagcaaatcatgtacactctgaacttcatgattcataggaagttttgttcatgggtaagatggaatcagcagatatgtctgataggcaactgggagacattacataggaaaactctttgaaaactatgaaataaggtacacaggtaggggattataaggatattgacaattatgttattgggtggtggcagcaggattgctgagattttaagttyagacagaacctccagactgggcagaggttctactcacaaaaataaggaatgagggcaatcttttcttctctcttttttttttttgtttgagacagagtcytgctctatcgcccaggctggagtgcagtggtgcaatcttggctcactgcgacctccgcctcccaggttcaagttagtctcctgcctcagcctccggagtagctgggattacaggtacgcaccaccacacccagctaatttttggttttttttagtagagatgggatttcgccatgttggccaggccggtctcgaactgatctcaggtgatctgcccacctcagcctcccaaagtgctgggattacaggtgtgaggcaccatgcccggccacagcaatctttttcaaaggtgtcctctgaggacccctagggcttcctgagaccttttcaggttgtgaggttctctcttaccccgaaacatatttgcttaaggtcatattttcttcatatacttcaaccaaaataacatattgcaacagattatgcagaagcagatacgagaatacagctgtcttctattaagccagacattaggagacttgcaaacatggaaaacaattccattaaaatttttctttgtttgtttgttttgagatagggtctcaccctgtcactgaggctgagtacagtgctgtgatcagggctcactgtacccttgacctcttgggctcaagcaatcctcccacctcagcctcccaagtagctgggactacaggcatgtagcaccacactcgcttaatttttgtttttttgtaaagacagggtctcgttatgttgcccaggctggtcttgaactcctgaatgtaagtgatcctcctgcmttggcctcccaaagtgctgggattataggcatgagccactgtgctcggccaaatttttggggggtttgtttgaaaaaatatagtattttttaaaaaataaaaagtgttatttgtgtttacatgtatagggattgttatcattattttcaaatgaatgagttaatacatatttacatttttcctgagttttaatttattttattttatttttatttttttgagatggaatctcagctctgtcacccaggctgcagtgcagtggggcgatcttggctcactgcagccactgcctcccaggctcaagggatcctcccacctcagcctcccaggtagctgggactacaggcaggtgccaccacacccagctaattttttgtatttttggtagagatggggttttaccatgttacccaggctggactcgaactcctgagctcaagctatgcacctgccttgacttcccaaagtgctgagattacaggcatgaatcactgtgtctggccagttttaacttttaataaggtaatgattgatagatataacccaaataaatgaaaactgtttgtagtcctcaaaatattgaagttgcaaaggggttctgagaacaaaatgtgtgtaaaccactggctcagagactgagtctaagctggtcaaattagattatttcatagcatggaggaaaagaacagatgagacaaagagagcttattagcaaaatgctgaaactaagtttgagatcctggatagtcacacattcattcattcaaacatttatgaagtcttactatgtgccaggccctaggccaagtgctgagggttttgaaatacctgagacaaggctgggcaagatggctcacacctgtggctcagaattttgggaggccgaggcaggcagatcacctgaggtcaggagttcgagaccagcttgaccaacatggagaaaccccatctctactaaaaatacaaaattagccaggcgtggtggcgcatgccggtaatcctagctactccggaggctgaggcaggagaattgcttgaacctgggaggcagagtttgcaatgagctgagatcgtgccattgcacaccagcctgggcaacaaaagcaagactccgtctcaaaaaaaacaaaagaaatacccgagacacatcttctgccttcaaggagtaaggaaggctgacatgtaaacaaacagtgacatagaatgtgatgagcgctacagtggagggtgcactgggaccatggtaagaagtgggagacaaagtggtcagggagagctgggaaatcttgaaggtcccagagacaggtaccattcgtgtctggggaagcccaaagtcatcgccatttgcttgcctgcttattttaacagtgttaaaactgtttttaactgtttttaagtcattgccagggaggcctaaagtcattgccatttgcttgcttgcctgttagttttaatagtgctggctgtcagcctggaggaggcaggggatggaggaggtagcgccagccaactaaggcctcaggctatgaatatgcaagagttttgccatagtcagagtctcaaggggcaagtaagaggaaaaaggygtaaaccagcatttcttctcattctattacaacataattctaccccctttcccctacaaagaaaatcagactggtaatatatttattaaatttttacctaatacatagtccttgttttttaaaagtcaaataacatagagaatgtgaaaatccctcttcattctcagcaaactaacacaggaacagaaaaccaaacatcgcatgytctcactcataagtggaagttgaacaaygagaatacatggacacagggaggggaacaacacacacccaggcctgtcacggggtagggggcaaggggagggagaggattaggacaaatatctaatgcgtgcaggtcttaaaacctagatgatgagtcgataggtgcagcaaaccaccatggcacatgtatacctatgtgacaaacctgggcttaaaacctagatgacgggttgataggtgcagcaaaccaccgtggcacatgtatacctatgtaacaaacctgcacgttctgcacatgtaccccagaacttaaagtaaaataaaataaaacaaaataaaaaatccctctcagtaatcactgttcctagtttggtatataatcatttcaactgttttctcttcccttcccttcccttcccttcccttcccttcccttcccttcccttcccttcccttcccttcccttcccttcccttcccttcccttcccttcccttcccttcccttccttccttccttccttccttccttccttccttccttccttccttccttctttctttctttctttcttttctgccttagcctctggagtagctgagactacaggctcacaccaacacgcctggctaatttttgtatttttagtagagatggggtttcaccatgttggccaggctggtcttgaactcctgaccttgggtgatccccacccacctcagcctcccaaagtgctgggattacaggctagccagcgcacccggcccatttcaattgttttctagacatatataaatatacatgaattttagataaagaagcttctgttggtttacactagaaggatgtgtaaagtcaacagcaatgccgtctgtgaggtggaacgtccgctgattgtgataaatgtagtataggaggctcccctaaagtgctgatggctaatggcaataaagtcagtgaaggaggatctctggatgcactttgtgaaagataaatcacactgcagagaagcccaggatcagaaacagtgcttcttgctggatacttctcggtcctggactggctgtccccgtgcctgcttccttctctctcttctctctccccaggcactggtctgttttgctttcttctcgcctacctctgcccacagcttttgactcctcttcttttctccctggtcctttgtctcacaggcttttccatgtcttcctgttctgggtacaagcctatggcttcttgagatttttttttaaagggctctccctgctgggaactccagggaatcatattttccacttttggttcttgaaccccaggaaaagtttgataaaggtgtttcaggaatttcatacccttccaagtggtgataacatagtttctgtttaaattatttgcaggcaagtcatggtggttcacgcctgtaatcccagcagtctgtgggaggattgcttgtgtccaggagtttaagaccagcctgggcaacctagcaaagccccatctctattactaaaatgaaaaaattacctacaaataaattgtttataaatcaagcaactattaattacttaaatatgatttccctttatatggaaccatttgagagcctcctgttgtgtactgagagagaaagcccttggtaaagaaggtgatgtatctctctggggtgaccaaatctgtctgcgtaaagtcttcttggatggcctttattttgcaacacttcatgaaacaatgatgaattattgattggttattgaaccaatgccagtaatcaattctctctggagttaaagggtctattgagggtagatagatataactcaaataaatgaaaactgtttgcactcctcaaaatgttgagggtagacccagtaactccagagagaatcgattattggcattggatgaacatatggttcggtcatggtgttgattatcctgtaatcctcacagaatcttattgatccaggtagcttatactgcacaattacaggtaaaagccaggacttctgtatagtaaaatcactaattaccaactctattaacttagttaccgctcccttatcatttgttaagacagtgcatgaaactggcaatccaattggggtgaccccttgtgtatgtaatcactaggtttttcctgcctggtttcctgtcttttctgggtccatatgttcaaagactccagcttgggcaccttttaacaagggctactcttctcaggcttccttggtttctagcactaaatacatttttttggttcagctagatttaggcagcaaaaagtctccgggtctcagcactagtatactctttgtagctttagtttttccaaaatgaccagtctctgggagatcttgagcaaaatagctcaaagaaggacagtaagagcaagtgcaactcttcctctgtaaccttctacaggagcgtgtggaatcaccgctgcctcatcagccagaaaaatccctgtacaaagacaggacttttacgttttactacagttggtgtcttcagctcttttgaaacagtgtgccctccttcgcagagaccatagctgcagaaatgttaccttatctcttatgacattaactgaagttcatgctatgtctcgaggtttctgggccacacagaagcaatgctatctagggggccgtatttttccaggatgactctagagaagaagactcttcatcttcctcaggactgttgacttcctggtttgattgctgtcttcgtaaactctttatgcaattctgaaaccacatgagaatttacaagccatcagctaaagccatactgaatccataagaatcaattgctttgctctccctggattctgcattcagaatggaatagaacagggaagttccagcagcctccttgtttgattgccttatgccctgtcctctactcctatctccagtcttctaggtatctgatttcagtattccatccgctgagagactctattatattgattcagcatggacaagtatctataggtctattcttccagctgggctaagatctcagagctactagaaacttcagggggatcactaacaggatcttggattcatttccatttttccagaataatcatcatcagtctgtttgtttttccttcaacagcaactcataaaagcttttggctctgaatctaatttcccaagaagaaactggccaygtgtcataggttctctagaaccagaatcttctgaacctaagccctaaaaagcttaataatgctcatagacttcrttactgaagcagatgtgagtgaatctagttctctcagttgtagtctctgtagacacactgatatgaaaygcacggtttcaacaaccttcagtgtataccctgaggatctaacccttccctcatttccaggttcctactttcctctgcctactctctgtcttaagacacatgaactatttggaatccaacttggaatgacccaataacattcaccagaatatgtggtgggatagcagcaaagataatggaaggaggaattgcccaagaggagtgactgtcaggggagggaatgggggtggaagacatccccagatttctagagaagcatccttaatgcttctcttcagagctatccaggttaggaaggaacagttgacttttgagtgtcaaaaaaagtgtatatataatagttcctttatgtgttcgactagtatagacatgtaaaggaactatgtacacttactggcagacgcaccccagacctctgatattctttgtcaacaagttgagggaagggatcccattccttcccagggagagtgttgttggaaaggacaactgtgttccatcacatatcacatattaggggcagggaagaagctcagtagcatacgatggcctatatggcaatcacctgggaaaggagatgtacaaagtttccgactgaagtcagcactggtgacttcttactgctctgagctgggcaggtcttccagcagttcaaaagaaagcacaagaatattcagtctctactgtaaacataggagtggataaaatttggttattacccaagctcatgacgttaatgattaataataattattagtcatacttcttcaataacaatacatttatgccccacctatgtctaaaagggatcagagctcatgttaaaaagtgcagatacagtaaaatatagcctgttagaactacaattaagaacgacctagcaaaacaagtgggaaaaggttagaagaggaaaaaaacgtgtaccagaacactctagattaaacaagagtactgcaaatgataacaaagcctgaggttcctagtggccaaagcgaagaagaaaactcaaataggtttcatagttctcattgctgagcaagaaaaaagcacaccagttaatagggaggtgctaactctgggaataattggccttgttggtttttatataaggagcatggaatatcataaaggataaaagcaatgttaaaaattggagcttctggccaggcacggtggctcatgcctgtaatcctagcactttgggaggccaaggagggcagattacctgagctcaggagttcgagaccagcctgggcaacgtgaaacctgggcaacatgaaatgtgaaaccctgtctctactaaaaatataaaaaattagttgggaggaatggcccatgcctgtagtcccagctccttgggaggctgaggcaggagaattgcttgaacctgagaggtggaggctgcagtgagccgagattgcgccactgcactccagcctgggcgacagagtgagactgtctccaaaaaaataaaaaataaaaattggagctacttttcatttgactcttttttatatctgccttccttaaaattcatattaaatactcattttataagggcaattttaggagaagtgtgtgtgtgtgcgtgtgtgcctgcacacacatgtataaatgtgtgtgtatataatatacatttttcatggtattttagagatgttgctttacccagaaataaamcttgaagagcctgaggacttaatgataggcatgtttttagaatatcatcatcagttgacttgctcagcaagccccttttaatattggataagaatgtattttaattaatgtaggttttggcatccattgccctctttttgctttttgtttgtttgtttgtttgtttgttgtttgagacagagtcttgttctgtcacccagactggagtgtggtggcgcatacacagctcatggtggtgcagcctcagcctcctgggctcaagcaccctcctgcctcagcctccccgagtagctggggctacagatgtgtgccaccacatccagctaattttttctctttttgtagaaatggggtctcaccctgttgcccagggtggtcttgaactcctgtactcaagcaatcctcccgccttggcctcccaaatttctgagattacaggtgtgagccactgcgctgggcttgctgccctcttttctagctctcttttcctcagaaatggtgcaacctttttggaaatgctatggttgccatataagtaaggactatgttacaatgaaggacaacccaacgaaaactggcttcaaccataatgggatttattgtctgggtaatgggatttattgcagggttcagggctgatcaagctagtgccttaatgacattgtcaaggatctgtctgtttctgttactcagttttgccaggggcacaatcagtttcatcctaaggctgactcttctggggctttctcattcacatctagtagaaaagagaagatcaccaaaggttccagaaatctctttttatgactccttgacctgaaatgggttacaaggtcatccctgaacctgtaaattgtgctaagggaggagtctctgcagatttgctctggcctgaactgcttgtccaagtcctatagccagggttggatttagcttctgccaacatatgtgagatgatccagagaggtgtgatacctcatataaaatcatggtattagccaagagaggagggaacagatcttaatgaagcaatagcaaagtcagtacagcatccagcacctggaaacttcagcctataacttggaaacatacagacaaaaaatttttttaatgattttataatttttatattgttttactattattatagtataagaatatccatgagaatgaaaagaaagaaaatccagctatkaaaccactggtttttaaaaagtcagtttttccttcaagtttttacacttagtgttttcaaaataattttcattttatggatacaatcattgtatggatacagttttgcattgtttttgttactatttcgatgactgtatcatattccattaagtgactcagtgatctcataatttacttaataattgtctctgtaagatttttaggttgtttgcatttttttttgatgttataaataacccaggtatcatttttgtgcatgtgactttttccttccttgggacttatctgtgtcagcatatggttcctgatacagatttagatactgttattcattttacaccagaatggagcttctttcaagacggtgatcttttgagtttaacaagtgcttttgcaattcaccttcagactcagttattaaactcttaaaacagagtttgcttataaggacatcttatagacttgcacaatcctaactatttggaaggaattttgaaaggagagtcagaatccttaatcagaaggatttagggtgttagggtgatagcatggtatattagtgtagtgtagaatagtggttaaatcacggcttttggagtaaggcagatttgagtttgaatccaagttataatacttgcttgctatattatcttttgaaaagttatttaacaccattctggggcctggcgcagtggctcatgcctgtaatcccagcactttgggaggccaaggtgggtggatcacctgaggtcaggagttcgagactagcctggtcaacatggtgaagccccrtctctattaaaaatacaaaaattagccaggtgtagtggtgcatgcctgtaatcctagctacytgggaggctgaagcaggagaattgcttgaacctaggaggcagaggttgcagtgagccgagatggtgtcattgcactccagccagggcaacaagagagagactccatctcgagaaaaaaaaaaaagcaacattctaaatctgagttatctgtataaaatggagatggtaattcctattttattggtatttttcaggatcctgggagaaaatgtatataaagcctggtgaataatgtatcaataatggtggttgttgttattattgagcaattgtgaatttgatctgagaacaagattaagaagcatgatatagtgtgtacagaagaatttaatttctgtccaagaaaaaaaaaatcagatactctctacatttgacatgaaaccatcacctagtctctgaaaccccttcgcacattctcatgtagttatcatccagtctccaaagatttcctggaatgagcccatttctgccttaaaatggtagtgacgtactggcatttgacatactgagtcaaatcckgactcattccccactctggtctagtgtcaccttatgaaatacaaagggcaattccactcttttactgtatcttacagaaaggagctgggaaggccagccctagaaccccctccatgtgagcctcagatgatcttcagctgacaatcctttgctgacacgcccagtggtgaaaaggatgtttgtgaagtggcccatttcataattgaaagtactagtggtgaagaaggactgccttttatgtagctaaagtttctcccctataactttttatttttattttttgaggcartgtctcactctgttgcccaggctggaatgcaatgtcacgatcactgcttactgcaacctcaacctccagggctcaagcgatcctcccaccttagcctcccaagtagctgggatcacaggtgcccaccaccaagcctggctaattttaaaaatattttgtagagacaaggtctcccagttttgcccatgctgctctatgaattcccgggctcaagtgatcctcaagccttggcctcctaaagtgttgggatgacccactggacttggccaccctctgtaacatgtatctcttgggataattctgggagtgatacacaatcggtctactatggaggcagacagatttgcattttaatcctggctccattagttgttttccttgggcaacttacttaaactctccaaaactggaaagcatggataatattggcacccaccgcataaggctgtagtaggattaaatgaaataagcatgtcaagcacttaacacaggacacgtaataggtgttttgaggcaataggtgtctagtcttgtcctttctttctcctgatttggagaagggtgatgatgaaatggatatgttgagcctctgtcagattcggaaatctttgaaccaggcgttccagttaaacaggctggttcttgactgtagagtcaaactacgatacttattacctgaagagaatagaaactagtggggatgtagggggagggaaacaccaggaaagatcatcaagttttttgtttttgttttttctttctttctttctctctctttcttttttttttttttttttgacagggtctcactctctcgcccaggctggagggcagtggcacgatcatgactcactgcagccttgatctcctaaggctcgggtgatcttcctgcctcagtcccccgagtagctgggactacaggtgtgtgccaacacacccaatttttgtattttcagcagagaaagagtttcgccatgttgcccgggctggtgtcaaactcctgtctcaagtagtccactcgctttggcctctcaaagtgctgggattacaggtgtgagccattgcgcccgacccattaagttgttttcagttttcttctgcaataatgcacccgagggatgtgatccccttacataactaccagtggttcacatggacagtgaactcagtgattttcccctggagtgggaagcaggtgtcctaagtgttctgtgtagtttgtaartcatcttgagatccctgggaagttctgagagccctctggaagcttttttctctttctactctctattttggaatcaccaaaatagatactgggaaacccactgccttcttgacatttctrttgaagacaagtaggactgattgcttgtctgattgcaacaggtcaaggcagcagttctcaaagtgtggtcccatgaccacgagtatcactttggaacttattagaratgcaaattgttgagccccacctaaacctatagcaatccatgttttttaggggttggtttgtttttgtttttgttttttgagatgatcttggctcactgcagccttgacctctcatctctcaccgagtagctgggaccccaggtgcacaccaccatgcccggctaatttatgtattttttttgtagaaacaggatcttgccacgttgcccaggctgatatcgaactcctggactcaagtgatccacctgcatcagcctctcaaagtgctgggattatacgagtgagccctgtacttggccagcaatttgtgttttaaaaagccttccaggtgattctgatgcatgctaaagtttgcttatcatcggtgggttaagaaaaggggagaaagacacatgagccaaatcatcaccccatgtacaaccctgggcttcctctgccctgcttttagattcagattcctgcagcctccatgcctgatgcccatctgatgctctcgacggatgacttattagagagactgagttctgccagcaccatttctaccttcacgctgtgtagggaggggttcctggtaaactgtgcttgcttgctaggtcaatcaaggactggctttatttctcttacccaagacttgaatgaatgtattgttctctttggactaaggaatattccagcctctttccaacatttactaaatataagttgtccttgactattttgatgacattgctgtgatgggtcaaacatggattaatgatgctttactcagtttgaaattgattcacttggccgggtgtggtggtgcaagcctgtaatcccagcactttgggaggccaaggcaagtggataatttgaggtcaggagttcgagaccagcctggtcaacatggtgaaacccctgtctctactgaaaatacaaaaaattagccaggtatggtgccgggcgcccgtaatcccagctactcaggagcctgaggcaggagaatagcttgaacccgggaggcagaggttgcagtgagctgagatcacgccactgcactccagcctgggtgacagtgcgagactccatctcaaaaaaaaaaaaaaagacaagaagagaaaatgattcacttatttcatttctaccctttattatagtattatagttatttttcatttttccactgttggttcaaccaacaaacacttattgggaagctactcaactacttattgagttgcctaaaaggtattatattcccagttttacagatgagaaagctgagactcagagcccaagtctatactgtaagtggcaragctgggatttgaacctagatctgtctggctgcagtgctcatgctcattctgctacatcaagttcattctgggacacgtcttcctcaatagaactttttaaggatagaaaccatgacactgctggtcatggtggctcacrcctatgattccaacactttgggaggctaacagcggaggtcagcttgagttcaggagttcaggaccagcctgggcaacatagtgagaccttgtctctacacaaaatttaaaaaggggtggcatgcacttgtggtcccagctactcaggaggctgagatgggaggatcacttgaccccaggaggtttgaggctgcagtgagctatgatagtgccaccccactccagcctgggcaacacagcaagaccctgtctcaaaaaaaggaaaagaaaagataaagataaaagaaaccgtgacacctagcaaggtattttatacattgtagaatttgaataatgtttgtttaatgaatataaaatgtgtttttagaataattcaggttgataggctgataatatgggctactaactatgaacatcggaggtattagaaatactcggtttgggtttcataaaatggtgggaaagtacccctcatctcatgggatggagtacaaaattcacagatgtaagaattaatgagggagaaagagtgtttgtatggggagagagtgttgaataggtactaaaccaaatttagattctaatttagaaaatttttaaggttgcttcttgctcttttctgtacctatgcacttcaatttaaaaagttacaaatagcgaatactgaatttctgcctgtcaataggcattttaccaggtcaagccatttttctcagaagacgtgtaatatttactgccttgtataataatcagagatattatgcatccataaatagttgacgggcaatgttatttctccgagcaatgttaattctccgaattggaaaagaggaaaagctgtagcaatgagtaccacctagtggctactcagaagatgtgacaatttagccaacctgcttcattaggaaaggttcagcttgctatcagttgtaactgtgatgggctttccgcacacagaagtttgatttccagcgggaccccattttcacatccagaaaaattgagtccaaataactaatgacaagtaatcacagatttgagttagaagtaaagccatatcttggacttaacagtgtggaatggggaaatgtgaataataatgtttccttctttgccattttttccccctgaaaaagtataatgttagtgcccaatccgtgatcattcgccttccagatgaggaagtgggagaagatatggcccaagatctgaaaatgaaaattcttaaagggaattgctcataagaggctgacaaattctacttttaaaatgtttgatgtgggccgggcgcggtggctcatgcctgtaatcccagcactttgggaggccgaggcgggcggatcacctgaggtygggggttcgagaccaatatggagaaaccccgtctctactaaaaatataaaattagccgggcgtcgtgctgcatgcctgtaatcccagctactcgggaggctgaggcaggagaattgcttgaacccaggaggtggaggttgcagtgagccgagatcgtgccattgcactgcagcctggacaacaagagtgaaactccgtctcaaaaaaaaaaamaaaaaaacagtttgatgtaattatggacttaaagaaaatttgcaagaaaaagacaaagaattcttgatacactgcatatatttcactcagttttcccatatatgaacatgttaccatgcttgcttctcctttctcattctctctttycccatcctccacacacatgtgcgtgtgcacacacacaaacacacacgcacacacaagtttgagagtaaattatagacataatgcccttttgttcctaaatacttcaatacgtattttctaaaaaacaaggatattctcttatcaaagtcagaaatttatcagcaatccagtactatcatctaatgaacagaccatattacaatttcaccaattataccactgacagcctttatagcaaaaggaaaaaaattatggtccaggattagctttcaatttttttctttttttgcttcagaacatttatatcaagtcaaatttctttagtctcatttaacctggaacaatttttttttttttkgggggacagagtctcactttgtcacccagtggtatgatcttggctcattgcaacctctgcctcctgggcttaagtgatcctcctgcctcagcctcccaagcagctgggattacaggcatgcaacaccatgcccgggtaatttttgtaattttttttttttgtagagatgaggtttggctatattgcccaggctagtctcgaactcctgagctcaagtgatccgcccacctccaccacccacagtgctaggattacaggtgtgagttactgcacctggccaaacctggaacaattctttagtttttctttgccttttatttcctggccaaaaaaacctgagcaacaaaataaataataaattataacccatagggaaraaaagctgccaagaatccataggttctaattgatatrtgtgtgtgtgtgtgtgtgtgtgtgtatgcgtgtgtgtgtgtgtgtatgcatgaatacatgaattaggaataagggaaagctcttctgaagagaatgtcaactaataaatggagaaggaattgtggaattttaaaaaatcaccatttgaggccggtgcagtggctcatgcctataatcccagcactttgggaggccaaagtgggcggatcacatgaggtcaggagttgaagaccagcctgaccaacatggagaaacgccatctctactaaaaatacaaaatttgctgagtgtggtggcatatgcctgtaatcccagctacttgggaggctgaggcaggagaatcacttgaatccaggaggcggagtgttgcgggaagtcagggaccccgaayggagggacctgctgaagccgtgacagaagaacataaattgtgaagatttcatggacatttatcacttccccaatcaatacccttataatttyctatgcctgtctttactttaatctcttaatcccgtcatctttgtaaactgaggatgtatgttgcctcaggaccctgtgatgattgcgttaactgcacaaattgttcataaagcatgtgtgtttgaacaatatgaaatctaggcaccttgagaacaggataagaatgattttcagggaacaagggagataaccttaaagtctggctgcctgtgggccgggcaggacagacccatatttctcttattactgaaaacgggtaagataaatatcactgaattctttccccagtaaggaatattaataattaacagccctgggaaaagaatgcatwcccggggggggggcctctaaaatggctgctctgggggtgtctgccttatgcagctgcagataacagatgaaacacgccctggccacctgcagtgcccccaggcttcctaggattaggaaattccaggctggcaaattctagtcagactggttctctgctcttgaaccctgttaagatgtttatcaatgacaatgcatgcacagcaggacatggaagttcattagtgattctagtttcgccctgaccttgtgatctcgccttgaccttctgccttgtgatcttttgtcacccttgaagcatgtgatctctgtgacccacaccctattcgtacactccctcccctttgaaaattgctaataaaaacttgctggttttacggctcagggggcatcatggaacctgccgacatgtgacgtctccgccggacacccaactttaaaatttctctcttttgtactctttccctttatttctcagaccagcagacacttagggaaatagaaaagaacctacgttgaattatcgggggcaggttcccccgatagcggagtttttggtgagccaagatcgtgccattgcactccatcctgggcaacaacagtgaaaaaaaaaatcaccatttgacaatgttagtaataatcaggcaaaaaatacacagtttgaaaggggtctccccacaaaaacacgtattaattacaaaaagaaaaacagtaattttacgttgaagaaactggcagacaccaccttaacaaaagatcaaagttaatctcactagtaatgagatgaacaggcaatgtgtagttcctgatatcatgcactgagaaagacacagtatcacttctatgrtatccctcccaaaaatgcataaccgaatttaaaaataagaaaacattagactaacttaaattgaaggacaatctgttaaataaatgacttatacttttagaatcctgctttgtaaacaaaacttagtgctccctacagccctactggcacatgggactggatggatgtgttagggtgcatgagggagatcaagttcttcagggtaaagtccaggtcttttttttttaayttaacttgcacacaatgtgtgcacagggagaatcacagggtgattgctcctaggtcttttttgatctgggaacactgagtcgctctctcaggagatgactgtgcccatctgatcgtactagtcatgccagggacagaggtgctgtgcctacctgccactcccatggctacagccactgacaccaggggccatgagaccacatctctattgtaaggtgtttggccaaggccttgaactctagagggagtactctagactttgggggcactttccaaaaggcatcactaccttttggaagcagacaaaaggaatcactacacagtgcagaaggcaggaatatctttgctctggggagtaagaactgggaagttaagctggttcaggaaaagaaaagtgtatttttataataacaatgtaagacaactactgagtggagttcagtctttctgaggtgggttggaagaagaggaggagacattgtagctacaaccctttcctaatgcatttcctggcttcctcatgccaccattaggctcctaaccaagtctagaggatgggtccagatgggggatgggcttccatcttggaagcatctctgactccagggcaataggctttcctgtctcctctgggggaacagtgagaaggacatagcctcttgggttgttttctagtgacctatggaatgacaagctccagtgcttattactacaccaaagtgatgtctgagctcttcttacatactccatcagacactggagtctcctttcaggccatcagcagcatggcggacttctgggatgtgagtataaratcttttstacccytccyctctctttctcaatggcctgaggccacaggtcagacaacggatcagaccttatgctgggaaatcaaatcagtcagggatcagactgagtcaaagggccaggctgaattaatgggttagtctagagttcaggtggaggtgggtaagggattaatacagcaatcagggaattaaaccaggagttagattagtatcgggagtcagaggtaaggctgaacttcaaaacgaattttaaataaagagtagggccacttcaggtcagactctggtcaaggttcattggtcaatggaggagttttaaaaagcaggccgggcacggtggctcacacttgtaatcccagcactttaggaggctgaggcagacaaatcacctgaggtcagttgttcaagaccagcctggacaacatggtgaaaccctgtctctactaaaaatacaaaaattagctgggcatagtgatgcatgcctgaaatcccagctcctcgggaggctgaggcaggagaatcgcttgaacctgggaggcagaggttgcagaggttgcggtgagccgagattgtgtcactgcactccagcctgggtgacaaagcgagactctgtcccttaaaataataataataataataataacaataattttttaaaaagcagactggagacaagctggggagtcagaggatgagggcaaaggtcattctaaaggtagggggtcaggaggaggctgggtaaggttcaagccagcttgtggttcagtttgcccagggcccactactggacagtttgtattggaccaaatggtacaacaaccagagcctgggccatggctcccactccttcatctactatgagaacatgctgctgggggttccgaggctgcggcagctaaaggtcygcaatgactcctgtgtggtgcatgaagacttccgggaggacattctgagctgctatgatgtctactctccagacaaagaagaacaactcccctttgggcccttcaatggcacagcgtgagtgagcctgtcctaccaatatcacagggcttgcccctctaaacctgacaccatcccaaggtctgggaaccacttccactgaggcttaaagagcctcagagctctttaagggacttctgggggcatctccctgaatcccagctgtgactgtttggggaccttggtctgtgtcactcaggaacagaggaggtaggttagcaaacacagcaatagcctccagacttgttcccacagacaggttgcaatcacacttgtcctaccttgcacgtagtccttccagggaaagcttcctttcttgcctagaagttggttaggggtatacaaaatgggtgaaattgaagaacccaacccttgagattgatacgtggagcagcaaggggtcaaggatggatgacaaattagggaggaagggggaaagggtggacaggacagaagagggaggaaataagcacccagggtagaaagtttagtggatagaatggagaaacatggggtgaaggagcctgatgtgcaatcacagagctggaggatcttttcctcctggtccaggtgcttcccttagggggactattcaaggtgggccaaaagtggggcttggctttgtcatccaaatctttgagtgacatagtgaaaaatcagatttacatttgagtttcagttctgtcatttatagctggattatctcggtaacctctttcatagtttcctcttctgcaaaatgtggataatattcactctcccttctcaratggttgttagtatcaaacagaataataaatgatacattatatatgtatatatcacatatctcatacacacacacacacacacacacacacacacacacacacacacaatatgtaaacctgtaaagcccagacaatgataaagcattgccattgccttgggagatgaacttttgggctggctcagctggcattttctgtggcaggtggacataccactcgcaggatgagttggggggcttctcccactggggcaggctcacaagctacagcggaggtggctactacctggaccttccaggatcccracagggtagtgcagaggctctccgggcccttcaggaggggctgtggctggacaggggcactcgagtggtgttcatcgacttctcagtctacaatgccaatatcaatcttttctgtgtcctgaggtgagccccctttccctactttatcaccctgtccatggctcctggttcccgtctcttgtgcatgagacccttccctaaactcctaccctgtggtgggggtggagaggagaggaagtgggaggagccgtcccaghgaagrctccactggaggtcatctccccctcccmcyataggctggtggtggagtttccagctacaggaggtgccatcccatcctggcaaatccgcacagtcaagctgatccgctatgtcagcaactgggacttctttatcgttggctgtgaggtcatcttctgcgtcttcatcttctactatgtggtggaagagatmctggagctccacattcacyggcttcgctacctcagcagcatctggaacatactggacctggtgrtcatcttggtgagggacagatatctaggacttgggacattctggggtgaggagggagttccaccctaataggggctccaggttcttccttttggagccctaagccctccttctgacttttggtcaaatcatcatttaacagctccctaagtgagagggacatgttcccctctctcagcccttgggaaaccctgtctctcacatctcctctcctcctcacctgtcatctgagccctgygttttttttttttagtgtactatattctgctcctctcttgtcttttgtctttatgacctgttctgtgraaacccatgccttttgtcttctattcaaatattctgccccttcatcttcatctccctcctattaacaagacacattcaattcctgaccaaagcttggaagtggtgggagcggaaggaaatgactggttccagttccctacagccctttacaatctatacattaatatttaccattgtccccaatgccttctcttgggctttggaacacttaagatgctcccyagtcatcctaccaagttccatttgaaactgagatagtgaacaagtcagcaaggawggcttttttcccacctgtcttacctaccctgactctcccttggggcctcatcttggaacttcccttgagatccccttgccttctctgacacccccatgacccctgtgtgacagctctccattgtggctgtgggcttccacatattccgaaccctcgaggtgaatcggctcatggggaagctcctgcagcagccaaacacgtatgcagactttgagttcctcgccttctggcagacacagtacaacaacatgaatgctgtcaacctcttcttcgcctggatcaaggtacctgggattcccacacccagctttgcttcaaggcgcactcattctcccttcttttcttttcttttttttcttttttttttttttgagatggagtctcgctcttgcccaggctggagtgaagtgggggcgatcttggctcactgcaacctccacctcctgagttcaagtgattctcctgcctcagcctcctgagtagctgggactacaggcacccaccaccacgcctggctaatttttgtattttttgtggagayggggtttcaccatgttggccagggtggtctcgaactcccaacctcaggtgatctgcctacctcagcctctcaaagkgctaggattacatgcatgagccaccgcccctgacttttttttttttttttttttttgagacgaagtctcactctgttgtctggctggagtacaatggcacgatctcagctcactgcaacctctgcctcccgggttgaagcaattctcctgcctcagcctcctgagtagctgggattacaggcatgcaccaccacacccagctaactttttgtatttttagtagagacgaggtttcaccatgttggccaggctggtctcgaactcctgaccttgagccatccacctgcctcagcctcccaaagtgctgggattgcaggagtgaactgccrtgcctggcttttttttttttttttttttttaatggtcccagtatgtccctcaatcagttgcccagactggagtgcagtggtgcaatctcagctcactgcaacttctgcctcccagattcaagtgattctctgcctcagcctcccaagtagctggaattacaggtgcgtgccaccatgcccagctaatttttgtatcattctcccttcttcaatatgtgtctcattttctttgtctggcttggcaactcctgtggcctccrtaggcccttggcatggacttttcaatgcttttcccttttccttcttcatcccttggttcaacatggtccttccagatattcaagtacatcagcttcaacaaaaccatgacccagctctcctccacgctggcccgctgtgccaaggacatcctgggcttcgccgtcatgttcttcattgktttcttcgcctatgcccaactcggctacctgcttttcgggacccaagtggaaaactttagcactttcatcaagtgcatgtgtgtgtcctgtccccttcactcctccctggcccctcaccctccagctccacgggtgtatgtatccttggggaagatgggtacgtgcgtgtctgcrtgtctgtgttcaaagcatctgtgtgagggtctccagaagccctggtgtgtgtgcttaaataatctaagcaccctgccctgtgtctatcagattggggtgaacgtgtggtgaggggtctctctgtgattaggaaagtgggatggggggtgyttgttaggctctgggtaaagcccagacctggtctctcagtttcactcagttccggataatcctcggggactttgactacaatgctatcgacaatgccaaccgcatcctgggccctgcctactttgtcacctatgtcttcttcgtcttcttcgtgctcctggtgagggtctctctgaggggtggggacatagagagcctgcagggtggagttttggtcctagtatgtccctcactcaggattgataagtttctcaaatcaaggatggagagtgagtggggggrccgatgtctggatcttctgagagatggttaatgtagtacagccagcatggtcagtttgcaggtttgcagagtataagggaacctgcagactccctcagtaaaatcaaaccctcattctccaaggatggaaatggggagaaaagtgccttatgaggagcagtagctgcacctggaagcgtctacgaccgtcctccaagactccccttcctctggggatctcatgctgatttctactgccactacttggtagttctctctccctgccaaccatgaaaaatctgggttattatttatttattttagacagggtctcactctgtcacccaggctggagtgcagtggtgcaatctcagctcactgcaacctccacctcccgagctcaaactatcctcccactttagcttcctgagtagataggaccactggtatggtcaggagccaccacacccygctaatttttgtatcttttgtagagacagtgttttgctatgttgcccaggctggtctctaactcctggactcaagcaatctgcctgccttggcctcccaaagtgctggattacaggtgtaggccagtgtgcccagctcttggattttatttttactaacaaggccagcaattttctttatttgatcaatggatggggatacagatatggattggggggtagatgaaaaagagatcacaattgtactctcaccctgaaaagcctctagttccaatgattgatgggcccttatacaaaggaggtctgtggcatatgttattgtatctctgtggtcagaaaggttactacagcaactgagagtgaggacaccaggttggtcaagaagcatgatccatctctaacagaactgtgctgaaaggctgggctctggggaccctgagaggcagggattgatgggctgccgaactggggttgagagcactgacccctttggaacacgtgtcttggacattaatggggtcagtgggctcaatcctttcagtgggtctgggggtgaggacccaggtccccacttcattttccagaacatgttcctggccatcatcaatgacacatattcagaggtcaaggaggagctggctggacagaaggatgagctgcaactttctgacctcctgaaacaggtgattgctcaatctccttgagctacacatttccatcagtgccccagtctaaggctctgtgtcctggtctgttcctgactgattgaggtgcctgtgcccttgtgtgcctttaaatttatccttggaagcctggcatactatgggtggggctggrggccagggatgagtgagcagcctgtgagaacttgtgcctatttcctttccctttcagggctacaacaagaccctactaagactgcgtctgaggaaggagagggtttcggatgtgcagaaggtcctgcagggtggggagcaggagatccagtttgaggatttcaccaacaccttaagggagtgagcaaccagagacccagccttctctaataacagtctcttaagtcctcaaccctcaaccatacttcattkgcttataagcctttggttttagtttaggggcctctgatcttgacttgcaggcttcagatctttgcccgtaggtctccgctcctgaccttcagaactgtgcccttggtttaaaaatctctgaccgtggtttataacatcctggatcttgttgaacaactcttaggaaacaatgtaataattccctaatcattgaatacacaccccactcccacaaaactctgatttttgttctatgcttccccacaaacactcatctattyctttagccattcactccctgattcccagtcaaacatattaatacacattgaacaaatacattgtgagcaccagctgcagatcaggcactgagtaatagacaacataattttttttttttttttgagacaaagtcctgctctgttgcccaggctggagtgcagttgcacaatctcggctcactgcaacctcagcttccccggggtcaagcaattctcatgcctcagcctcctgagtagctgggactacagtcatgtgccaccacgcccggctaatttttgtatttttggtagagatgggattttgccatgttggccaggctggtctcaaactcctggcctcaagtgatccacccacctcagcctcccaaagtgctgggattaggagacaacgtaattaaatgggacaaagtctttgttttctaagagctcatagacttgcaaataaactgaatcacagaataagttcaacagaagtgactaggagtagagggtgatcaattctatctctgagcttaagggaaggcttcctggaagaggtaatgtctaaataggatattggaggatgaatagctcacaagtggacaagcagaggaaggctcttccaagaagagatgaaagcacatacaaaagcatagaggtctgaaaccaagcaacatacacaggaggaataagtagttgagcattgctaagtattaaataaaggggcggggacaggtggtggtcatagcaggagatgagaccagagaaacaggcaaggaccacactgagaaaggccacactaccactctgccaaaagaatagggtgccagaagggatttcaagaaggcacatttttagatctgcatattagaaaggttaattactctagttgtattatggaggatggatttcaggggtagggagtaaaggggaagctgggggatagcaggttatttagaggcaaacagattttgcaataatccctgtaggaggtcatgaggccctgaacctggtgagcaggagtcaggagaggaagaagaaactgaactgaactgagtgttttcctgggggtaagattgctagactttggagaaccttctttwccagaagcaaaacttttgccagagtcaagcaaaagagtgaggaagtmcataactgagaggtcacagccacagctgggcagaaatcatttcatcatcctcttctcagactgggacacgcagagcatgaaatcactgagctcacggccaccttcaccaagtttgacagagatgggaatcgtattctggatgagaaggaacaggaaaaaatgcgacaggacctggaggaagagagggtgagctgggctgatgggtggagaggcagtgtaaggaaatagctcaccctctccttcccccaacatacctagaacacaaacccacctgaaaactctcccatagatagtaaagaactctctagaatagtagttcccaaactgctgcacattagaataccctggggggcctttaaaaatcttcatactcaggacacacactctagaccaattaaaccagaatctctgggtgtggggcctagacatcagtactttttataactccttaggtgattccaatacatagccaaggttgagaatcatgctctaaaacacaggcttagggaaaaatgaccaactgcccaagaatcactgataattccctcagaggacttgccttctcttgggaattttcagacttggattcttggctgtccctacwgtgcctgctccatccctatccagtgtggaccaaaaaaagtcaaaggcagggtgacagcagcctagaaagtgccaagaacactggtagtgtccctcctctgctaaaatgagttggcctctagtaaayacctcatccatcaagccttctaggatcttgtgttttctttgagaggtgactcctccagaggttggtccagcaccaccaccctgaccctattgtctccagagtctgggagggaaggggaatagcaagaactaggacctgagccttggtcctgagatcccagtagagtrggwgatagaacaggagctgatggcttcccagagttatctcctcccctctaacctctgacttcctgagcaggtggccctcaacactgagattgagaaactaggccdatctattgtgagcagcccacaaggcaaatcgggtccagaggctgccagagcaggaggctgggtttcaggagaagaattctacatgtacgtgcagccaagaaaggctggttcagggctggcaacacttctattacgataccctgtcttgtacttttcccacaactttccaattctctgtcctaccccagggagaacctccgctcccctttaattctgcctacaaggctgggtcttcccttccttgttccattcaggacacatgcccttctgtgaaccctggctctttagacatccagcccccagacacagatttctgctccattcgtctctctcaaatcccacacaggctcacaaggagagttctgcagctggagactgtcctggaaggagtagtgtcccagattgatgctgtaggctcaaagctgaaaatgctggagaggaaggggtggctggctccctccccaggcgtggtgagtggcccttcacctggtcctcctagttcctcacagctgaactctgccatcttttccactcagtgggtggggcaagaacatttytgaaagacctatgttttcaggctcctggggaaacatgttcatagcggttagtgtatcagcagagatgggtcatggagataaggcctggaagttgcttgccctggcctaagggctgccttggccacatgagatggtctgtgtcagtctgtttgggctgatataataaattatcatagactgggtggcttataagcaacacaaatttgttcctcacagtttgggaggctgggaagtctaagatcaaggtgccagtagattcagtatctgttgagggcccacttcctgattcatagagagctgtcttcttgctgtgccctttcatggtggaaggggtaagggaagtctcctttattttatttttttattttatttattattattwttwtttgagatggaattttactcttgttggccaggctggagtgcartggcacgatctcggctcactgcaacctccgcctcctgagttcaagtgattctcctgcctcagcctcccaagtagctgggattacaggcatgtgccaccatacccagctaattttgtatttttagtacagatggggtttctccatattggtcaggctggtctcgaactcctgacctcaggtgatccacccacctcgkcctcccaaagtgctggaattacaggcrtgagcccactcataagggctacatactcactatctaatcccctgccaaaggcccmacctcctaatactatcacattgggggttacaattttaacggatgaatttgggagggacgcaaacagtctatagcagtctgagttctctggaatcagatagagagaaaagaaaagtggtayacaaactatttcttcaaatgatttgtccctttcttcttccaacagaaggaacaagctatttggaagcacccgcagccagccccagctgtgaccccagacccctggggagtccagggtgggcaggagagtggtgaggaagggggcctaaagcatcagacagcaggcttccctccctctgcctccgcacaggccccctcgccacatcccctgcacttctaggacaacaggtcccatcatggctgctgctgagccccaccctgcatctggccttttgagccaatgtttctgtgtgtggtgggcatcatgcttaggcttgtgaatcagtgtttctgtgtgttgccacrtagctctgtgaaataacgtcttccactgggccttttactccctgtgtacttagctctgtgtgttaattaaaaaaaaaaaagttaacaaacaggataaagagagggagggtaatggctcttcctaagcacctggatagccatggtctgtgaaaaaggtagaaaccaagagagtaggcggtatctagatgtcttcctacttcccagtgaatcctattcttatcctttgtgcatcccaagatttgttgytagcacccatgggtttctcgttttcccccacagaggttccctataaaagagaagaggaaghcttagaggagaggagactctcccgtggtgagattccaacgttgcagaggagttaagtgtgaggcactcccggagcaaagtctatgaaggatcttctgcaagaggctgcctcctggtccactgaacctggaaactgagtgggctttaaccaggagataaaaatggagcctgaagggaatcaggcaaggaaatgaactcaggattcagagatctttgaattaatatgtggtgggttctgacattattcttccataagaccatgtgggtttccatggtggctatcaataaaactccttaggaaaacttggacttygcatttgcttctggtattayagagggaagaaaggctgaaattgtgggtcatccatgtgcctgggctggaataggttcatgctctctaggaggtatagagtaggtgcagtgatgtgaaggagctgggctataagaacttctaggcctagcacagtgactcacgcttgtaatcccagcactttgggaggctatgttgggtggatcacttgaggccagaagttccagacaagcctgggcaaaatgctgaaatcctgtctttaataaaaatacaaacaaattagccaggtgtggtggcgcgtgcctgttatcccagctacttgggaggctgaggcatgagaatcgtttgaactcgggaggtggaggttgcagtgagctgagccgagatcacgttactgtactccagcctgggtgacagagcgagactctgtttcaaaaaaaagaacttctggctcgcaggaatggcttgaaatagtggctactatggttgcaccataggaaaagtggggacaggtgacaagtgagactcagtcctcagggtggagacagtcagggtaggagggctggggataaggggtagctggcgtgtgtgtgtatgtactggcatcggggtggggtgagagggtgcagagggaggataaccagggataagaaaagaaactaccaagattttgggtgtccaggagcctgcctgaggcctgctgaatatctcctatcccttcttctgtggcctttatccctcctcattttgcaccttcaattgctccccagtcacttcttctcatccatctctttcactcactcctgttctcccatcccattaagtactctgtacacctaggaggcttgtgaaacagcttaaatgcaattaagataaccagagtgtatcctcagccctaaaaaagttacagtctaagctttcttcaaggaaggctgtatcaactgaagagaagtagatgcctgcctgcagtttaagaaataggggccagtgagttggtgttaactcaggacattgggagggacagtatttaggaccagggatcaatgcctgaaggtttcccaaagtgtggacgagacaacctgtaaaactttggattccctgagcaatcttttgatgactaactccagtgcggagtgtcaggagagcgggcaacccgtcttcagtggttttggtcagcaggccacaaacagggttgactattcccagacgggtcgtgagtggtacaagatgagtgatccctccagggtgtgactgtagggatgagctcgccctcagtcccagacgtcgcgactgttggcagtggatcaattcacaacagcctggcgtagcttcaatttcggctccggaatcgccctttgctgtgtcatagacctgaggctggactggaccgctaggcgcaggactgcagggccggccgggtgggcggggcacacccagtgcgcatgcgcagcaccccggcccggaaacagcgcggggtccrctatggcggcggcagcsgagggcgtactggcgacccggagtgatgagcccgcccgaggtacccggaatggatggggaggaagcgtccggtggggggcctggggctccgtctcgggtgggcgaggttgagtgtgtggtggctcacctggcaggaacgggctggtgagaggagtgcacttgtcgctgcgcgcgagtgtttgtcctgtcagggtgactgggatggtgccaggatgagcgggggtgccgggtatgggcgaggggcggtgcgagggaggcgagttgatgtgtcagatgggcagggacgcagtgaaggacttgaaattatggcagatggagaatggagccgacttgatggaatgaaggcaagtggagggatgtcggaacaggctgctttggctggattagcaccgggtgtaggcgggacacttagtcattctcccttggcccagacgatgccgccgtggagacagctgaggaagcaaaggagcctgctgaagctgacatcactgagctctgccgggacatgttctccaaaatggccacttacctgactggggaactgacgggtgaggcggggtctgggttgattcgggtgcggtttggcccaggaggcctgggagatggttagcagcatcagtctgcagctcccttcctaccctgcatgccctgagacaggcctgttggaagttgggggaggccatgaatgggagagaaagaaaatacaactctgcaggcctctgtaacatagactaatgagaaaacaataacaaaaaagagttcatatccagcaacagtaatcaagaagtgcttccttggggaaagtgtattttgagcagggttgtgaagggaattattggtggaaaagggggagatgatacaactagcgaatgaggtggtatgtgcaagcagtgtgtttggctaaagcagaagatgtgtttaccgggataaagagaaatgaaattgaggaacggggagtgacctgcagatttagggacctattagtttggtctgaggatttgataacccatcctttgggacatgactagtgtttgatcgtttccaagtggacacatgacctatgtgtggaggaggatcagaaagtgaagtatgggcagggcgcggtggctcatgcctttaatcccagaggccgaggctggtggatcacttgaggtcaggagtttgagaccagcctgggcaaaatggcgaaatcctgtctccactaaaaatacaaaaattagccggccgtggtggcgggcgcctgtaatcccagctactggggagactggggcaggagaatcgcttgaacccaggaggtggaggttgcaggttgcagtggactgagatcacaccacttgcactccagcctgggcgacagagtgtgactccatctcaaaaaaaatgagaaagaaaaaagaaaaagaaagaaagtgaagtctggtccagtacagcatctcaaaaacatttattaaattgtttcacttccccaggaaattactgtaagctaaatttgtgaatcagaatctatgagaaaaggcttgatacagaatagtaggggttgtgaatctgtaatttttttttttctttttctgtttttaagagacagggtctcactatgttgcctgggctggtcttgaactcctgagctcaagtgatcctctttccatctattttggttgatggcaccacccaggcttaaaaccccagatacatcttagtctgcttccatccctcaatatctacttgaacaagtcctataaattccacttctgtaatgttcttgcacccatgctctcctttccattccttttaccaccactctgcctgagatcttcattacttttcttttattattattattatttaaaaaaatatggccaggcacggtggctcatgcctgtaatcccagcacttcgggaggcctaggcaggtggatcacctgaggtcaggagttccagaccagcctgctcaacatggcaaaaccctgcttctactaaaaatacaaaaattagccaggtgtggtggcacacgcctataatcccagctactcaggaggctgacacgggagaatcgcttgacctgagaggtggaggttatagtgagctgtgatcgtgccattgcactccagcctgggtgatggagggagactctgtcctaaataaataaataatagagatgaggtctgctccgttgcccaagctggcctcaagtgatcctaacacctcagcttcccaaaatgctgggattacaggtgtgagccactgcacccagctgtgactctgtaagttatcagcctgattatttgtttgtttatttttgagcaagagaaaccaagtaacaaaatgtaggtgtttggcttctctttaacaattccaaagatttggcgctactagcccctgcattctttcaaggctataattgactagagctgagcagctgcctcttaaaaggactagtgctatctaatttgtccttaccactttctgttttctccctttactgggaactagtgtcaagtgccattgatcactgttctctactgttatttttattagtagcagtacagaaatggttttctataccaatggctctatcaaaactggtaaagtaaatgatgggctaagaggattgcatattgcaagaagtaaggggaagcacatttcttcatggaagtgaataattttcttatgcatttaatgtgcaagcacttggcttactttactcatttacgttatcttgctggcttctaggtgtttgaatatgtcacccttgttttattttattttatttagacggagttttcgcttttgttgcccaggctggaatgcagtggtgcaatctcggctcactgcaacctccgtctcccaggttcaagcaattttcctgccccagcctccaaagtagctgggattacaagcacacgccaccacgcctggctaatttttatttttatttttagtagagatgaggttttgccatgtcagccaggctggacttgaactcctgacctcaagtgatctgcccaccttggcctcccaaagtgctgggattacaggcatgaggcgcaatgcctagctgtgacctttgttttagagagactaatttgatagcagtataaatatgagagtgtagatatgggggagagagaacagagagagatgagcaataattcagatgaaaagtaatagaggaccaggcaccgtggctcatgcctgtaatcctagcactttgggaggcaggagaattgcttgaggccagtagtttaagaccagcctgggcaacatagcacgactccatccttgtagtcttgtcttttcccctaccatccagaggttacatgctccaagtaatctaataataataaaagaaaagaaaagtaatgaagatctgaggcagagtggtggtaaaaggaatggaaaggagaacatgggtgcaacagcattacagaagtggactttataggacttgtttaagtagatattgagggatggaagcagaccaagatgtatctgaggttttaagcctgggtggtgccatcagccaaaatagctggaaagaggaaccatgtttagtgtgaaaatgttttcagttttgggttggctgcttgttgatgtaactagggaactcaggtgacttgtacattggattccagagctcagagattgatcagagcacaagaaacagatttcggagtcactttcgtagtggtgtgattggacgctgtgcaggatgagattgccaaggaagagcttagaagtaggtaagagagcctaggctaaaatgtcagggaatgcctgtatggtgcacttaatttgtttttagtaacacttaaagtacctaggtttccaaatgatttattatataattaattttaagcaaattgttattttcctgtgattgttattcttactcgcacaaatgctttattgaatttaagagtaaattgatatttcctcttaaactatgctagtttctagcataagcctgggaatgcccataggtatgtgctacccatgtaaacatcagttatgtgttacagctgagaaacagttgagaactgatagttaagggggtctgataagaaagcatctggcatagacatctaagaagagcagttagagattagaaaatcatcggtgtagtacaatgccatagcagccaaaggaaatgagcatttcccaaagagaaggagatcagtagtgtccaagacaatggagaggtttaggaggataagaactgagcaaatgccatggatttggtggttagcagagcaggatgactttggagcatgtaatctctggatggtagggccaaaaaccagactacaagggtatatgcaagtaaatggtaaggaagaggatgtagtgagtgtcagctactttttcaaattgtttagcagtgaagctcctttgctttactgagcaaatgatatagatgtagcagaatagagagagtgcttttgagctggaagaaatctgaatatattgatacatagagaggaaggtgccaggag

SEQ ID NO: 6791 - DNA, 47622 bp, Homo sapiens
aatcagtcttaccccttcttccaacccttttccttttccgtgcatgtattgatctattttttttttttttttgagatgaagtcttgctctgtcgcctgggctggagtgcagtggtgcgatcttagctcactgcaacctctgtttcctgggttcaagcgattctcctgcctcagcctcccgagtagttgagatttacaggtgcccaccaccatgccaggctaatttttgtatttttagtagagacggggtttcaccatgttggccaggctggtctcgaactcctgaccccaaatgatccacccacctcggcctcccaaagtgctgggattacaggtgtgagccaccgcacccagccatgttgatctatttttaaaaagtttttatttcctgttacactgtgttcagctatcttcagccaccttaaattcccatggatgagttttcataaactttttgaaaatagatttagatttacgggaaagttgcaaagataatacagaatttaatggatgagtttttttattgatgtgtaatagatgtatgtattttcagagtacaagtgataatttaatacatgtatataatgtgtaaatattaaatcaagagttattgggatgtccttcaccttaatatttatcttgtctttatgctaggaacattatttgaattattctcttttacctattttgaaatgtacaatagattaacattagctatagttactctactgatctatcataggtcttatttcttctgtatttgtgtccactaatcaaactcttcatcctcacgtccccaccacctttcctggcctctggtaaccaccaatctacctccatctccatgagatccacttttttagctcccacatgtgagtgagaacatgtaatatttgtcttttctgtgcttggcttagttcagttaacacaatcacctccagtttcatccatgttgctgagaatgacagaatttcattccttttatggctgaacaatattccattgtgtatatataccacattttctttacccattcatccattgatggacacttaggttgattccatattttagctattgtgaatagtgctgcaataaacatgagagtgcatatatctctttgatatattgatttcctttcttttggatacatacccagtagtggaatttgctggatcatattgtagttctatttttagtttttggaggaaactatacaattttccatagtggctgtactaatttacattcccaccaactgtgtacaagagttcctctttctctgcatccttgccagcatctgttaattcctgtcgtcttgataggaaattttaagtgggatgaggtgatatcttgttgtggctttgatttgcatttctctgatgattggtgatgttgagcattttttcttatagctgttggccatttgtatgtcttgagaaatgtctattttgatcttttgctccccccgctttgtttttttaagagatgagttctcattatgttgcccatgctggaatcaaactgggctcaaacagtcctcctgggactgggcatagtggctgaggcctgtaatcccagcactttgggaggctgagtaggtggaccatctgaggtcaggagttcaaggccagcctggccaacatagtgaaaccctatctctactaaaactacaaaaaattagccaggcatggtggtgagcacctgtaatcccagctacttgggaggctgaggcaggagaatcacctggaccccagaggtggaagttgcagtgagctgagactgtgccactgcactccaacctgggtgacagagtgagactccatctccccaccccctccccctcccccaaaaaaaccctcctgcttcagcctcctgagtagctgggactacaggcaagcaccaccacatatggctttgcccatttttagacaggattttttgtgggtttttttcgctattgagttgtttgagctccttgttatatttattctggttattaatctcttgtcagatggatagtttgcaaatattttcttccattctgtgggttgcctcttcactttgttgattgtttcctttgctgtgcagagctttttagtttgatataatcctattagtctatttttgcttttgttgcctgtgcttttgaagtcttatacaaaaaatttttgcccagatcaatatcttggaacatttctccagtattttcttctggtagcttcatagtttcatgtgttaggtttaagtctttatccattttgatgcgatttttgtatatggtgagagatagagttgagtttcattcttcagtatagggctatccagttctccaagaatcatttattgaagagactgtcctttcctcattgaatgttcttggcacctttgtacttttggtattgacataaaatgagttggctgtaaatgcatggatttatatatgttccattggtctatgtgtctatttttatgtcagtaccatactgattgggttaccatagctttgtagtagattttgaggttgggcagtatgatgccttcagctttgtgctttttgctcaggattgctttggctctttggggtcttttgtggttccatatagattttaggattgttttttctatttctatttctgtagagcagcagtccctaatctttttggcaccagggaccgcttttatggaagacaatttttccgtggacgcggggggatttttttttttaatggtatgaaccatatttattgaaaacattatttctggcctttctcaaattgaagactgcaaaaaataaaagcagtgctttattgagttgtcattaaccttgagagcagtggcgctgcctctccacgctctggggacggtggaaaccgtggctggtgcgtgccacatctatcacacctcggtctacaaaacagtcctgacgtcaaataaaactattgtggccgggcgcggtggctcacgtctgtaatcccagcactttgggatgccgaggcgggcggatcacgaggtcaaggaaatcgagaccatcctggctaacacggtgaaaactcgtctctactaaaaatacaaaaacaaaattagccaggcatggtggcgggtgcctgtagtcccagctactctggaggctgaggcaggagaatggcgtgaacccgggaggcggagcttgcagtgagcgtagatcgcgccactgcactgcagcctgggcgacagagcgagactcagtctcaaacaaaaacaaaaacaaaacaaaacaaaacaaaaaaaacaaacgctcgtacatgacatttacattagaaaaagagagctgaaagtagggatggggggatggtttggggatgaaactgttccacctcagatcatcaggcatcagattcttgtaaggtacgcagcgccgtagaaccctcgcatgtgcagttcacaatagggttccagcctctgtaagaatctgatgccaccactaatctgataggaagtgagctcaggcggttattctcacttgcccaccgctcgcctcctgctgtgcgtcctggtttctgatgggtactggtccatagcccgggggttggggatccttgctctatctagagaatgccatttgtattttgatggggattggactgaatctgtaaattgctttaggtagtgttgtcttttttctttctttcttttttttttttttgagacggagtctcgctctgttgcccaggctagaggctggagtgcagtggctggatctccgctcactgcaagctctgcctcgcgggttcatgccattctgctgcctcagccttccgagtacctgggactacaggcgcccgctaccacgcctggctaatttttttgtatttttaggagagacggggtttcaccgtgttagccaggaaggtctcgatctcctgacctcgtgatctgcccgcctaattcttctaatccataagcgtggaatatctttcctttttgtgtgtgtgtcctctttcatcagtattgtatagttttccttgtatagatctttcatttctttagttaaattgattcctacgtagtttatattctttgtagctgttgtaaatgagattgcttttttgatttctttttcagattgtttactgttggtgcatataaatgctactgatttttgtatgttgatttggtatcctgaaacttttactgaattcgtttattatttctaacagtctttttcgtggagtcttttgatttttcaatacgatgagtttttatgtcttacttttgtatcctcttctgggaattattacctgctcatgtttggcaaacttctactcttcttcaagattcagtcttgagtgctactcctgggcagtgctgtattatccaaagagtaggaaaaaatgcatgcttatgtgccagcaaagcagagccaccagttatgaggcaagaaacaaacaaaaaagaaggcttgtaggctgtgggaaaagccagaactttgtagttttgtttggttattgagacagggcttgctgtgtcacccaggctggagtgcagtggcaaggtaatagctcgctgaagcctccatctcctgggctcaagtgatctccccacctcagcctctggagtacctgggagtacaggcatacggccaccatgcccagctaacttttttttttttctttttaaatttgtagtagagacgaggtctggctatgttgcccaggttggccttgaactcctgttctcaagtgaacctcccgcctcagcctcccaaagtgctgggattacaggcatgagccactgtgcctggcctgtagttcttctttaatcttatgttttattaattttgaattatttagatgcccttgatgagtcttcctttccccgcagtcgtcaggaactctctcttgtttccatttccttacacacttgtttcctaccacttggcctgaacccttcaaaaaagtcaatattacaaaaactaaaaccaaataggtaggagggcttttgtagattaaaatagagacagaaccaaatgcaagtgtgaaacttgattgcatctgaatcaaaacaagccccaaatataaaatcagtttgtagggaaatatggagaactttaaatatggatgtatattaggtaatattattgaataattaatgttaattttcttagctgtgttaatagtattacggttatgtaggaggatatcctaatcttaggagataaatggagatgtattcctgttgtccgcactttattttattttattttttgacacggagtctcgctctgtcgcccaggctggagtgaagtggcgcgatctcggctcactgcaacttcctcctcctgggttcaagcgattcccctgcctcagcctcccgagtaactgggactgcaggtgcgtgccaccacgcccggctaattttttgtatttttagtagagagggggtttcaccgtgttagccaggatggtctggatctcccaaagtgctgggattacaggcgtgagccactgcgcccggcctgtactttactttcaaatgattgagtgagaatggaagggcttgggcactttgagagaaagagaacacaagcaaatttgccaacatgctgagacttactgaatcaaggtaatagccattattcttttaacttttttttttttaatttgagacggagtttcgctcttgttgtccaggctggagtgcaatggcgcgatcttgactcactgcaacccccgcctccctggttgaagcaattctccaccatgcccggctaatttttgtatttttagaagagacggggtttcaccatgttgcccaggctggtcttgaacgcccgacctcaagtgatccgcccgcctcagccttccaaagtgctgggattataggcgtgagcgtccacgcccggcctcttaactttttgataggttaaaaacttacaaaaaacgtggatagagggggtctgtcttgcccactagaccgatatggtgttggttaggttaggttaggttaggttaggttaggttagaacccgacattgtgctctgtacttcctagccattcattcgcttcaagtgctctgaaatttaatttaaaaaatcatagttggaatcctttcggtcactttctctttctcccttcgttcctccctttccctcttgattcttccttgaggcgcaaacacctgagagaggcttctgtccctcggcggtctccgtaagtaagtgaaccgttattggctggagggcgctgacgtctgattgttgcgcggtcgcatttttccggggaacgcggattcgcattcccaattttaggtggcagtcgcaacccrtactattcggacagatggcacagaaaccgctgcgcctgtgagtgaccgtgaatggaagcctctctccctgtgtctctttcgtgtgtgtaggtgacgacacgggcgggagtctttcccatgacgggaagggagaaggaaaaggcggagagacacggggctgctggggagcttaggtgatgtctttgcctggccggggctgacctcttttcctggcccttttcgcttctgagggggtttctcttggcgacgctcgttcggagaggcggaagctcccagagttaggcctcctccatcttagggggcagtcctggcctctgacacatcctttccccttcgtttctcctgaccccatttatttactcgccaaatagccattgggcccactgatgggccctgggcagtggtggacagagtagatagggacccttccctggggcattttttttttttttttttttttgcgaggaggaggggtgggggtggtggtgaagagagggcttcatgcagcaagtatttattgaagaactgcagtgtgccggacgctgtgctaggtgttgcaacagatggagttcctgctttaatggagcgtagagtctagaggaacaggtactaaagaatccagataatgggccgggcgcggtggctgaggcaggagaatcgcttgaacccgggaggcggaggttgctgtgagccgagatcgcgccactgcactccagcctgggcgacagaacgagactctcaaaacaaaacaaaacaaaacaaaacaaacaaaaaacaatacaaataatggccgggcgcggtggctsacgcctgtaatcctagcactttgggaggctgaggcgggcggatcacttgcggtcaggagttcgagaccagcctggccaacgtggtgacaccccgtctctactaatacaaaaaaaaaaaattagccaggcgtggtggcgcgtgcctgtaatcccagctacttgggaggctgaggcaggagaatcgcttgaacccggaggcggaggttgcacagtgagccgacactgcacctctgcactccagcctaggtaacagagtgagactccgtctaaaaaaaaaggaattcagataaatgtaaagttaccatagtgatagggccaggcgcagtggctcacgcctataatcccagcgactccggaggccaaggcaagagaatcacttgagtccaggaattcaagaccagcctgggcaatatagcaaggccccgtttctacaaaaaatacagaaaaaaaaaaaaattagccgggcgtggtggtcccagctaattgggaggctgaagcaggtggaccacctgagcctggggaggtcgatgctgcagtgagctgtgatcgtgctgctgatctccaggctgggtgacagattgaaaccctgtctcaaaaaaaaaaaaaaaaaattgcaatagtggtaacttttgggaagaaaatattcgtgaatctgggagagtgcataagaggggtatttggcttaatgataggagtcaagaaggcttcccgagaatgttaggattgagccttgggaaataagagtaatccattgcttaacagcagggttatgttctgagaaatgagttggtaggcgatttcgtcattgtgcgaacatctttgagtgtacttccagagacctagatggtatggcttcctgtacacytaggctaaatggtatagctgtacgtcaagttactgtactgaatactgtaggcaattgtaacacaatggtaagcatttttgtatttaaatatagaaagggtacagtgaaaacacctggcygggtgtggtggcttatgcctgtaatcccaacactttgggaggccgaggtgggtggatcacctgaggtcagaagttcaagaccagcctggccaacatggtgaaaccctgtgtctactaaacatacaaaaattagccgggtgtggtagcgggcgcctgtaatcccagctactcaagaggttgaggcaggagaatggcttgagcctgggaggcagaggttgcagtgagccgagatcgcaccactgcactccagcctgggcgacagagcgagactgtctcaaaaaaaaaaaaaaagaaaaagaaaaaaagaaaatactgtatacaggaaaaaaaaaaagggcacaacctgtgtaggacacttatcatgaatggagtttgcagaactgaaagtttctctgagtgagttagtaagaggtgagtgaatgtattactttacagtattgtagactttatgaatactgtacacttcacctatattaaatttattaaaatattattttcaacagtaaaccttagtttactgtaacttttactttataaactttaagtttttttacactttttgactcttgttataacacagctaagacataaaacacattgtacagctgtacaaaaatattttctttatatccttattctacaagcttttttctattactttttttttctttttaccttttaaactttttttttttttggagacagggtctcactgtcgcccaggctggagtgcaattgtgcaatcacggctcactgcaacctcaacctcctgggctcaagtgattctcccacttcagcctcctgagtagctgggactacaggcggaagctaccacacctggctaatttctgtattttttgtagagagggggttttgctatgttacccaggctggtcttgaactcctgggctcaagttaccctcctgcctcagcctcccaaagtgctgggattacagacgtgagccactgtgcctggctttaaacttgttttgttgcaaactaagacacacacacgagtctaggcctacacagggtcaggatcatcagtatcactgctgttcacctccatatcttgtcccactggaagggcttcagtagtaataacatgcatgaagctgtcatctcctatgataacagtgccctctggaatacttcctgaaggacctgcctgaggcttttttacagtcaactttttttttttttttttgaatacgtaggagtrtactctaaacagtaaagagcataccatactgaatatatttttttttttttgagatggagtcttgctctgttgcccaggctggagtgcagtgccrcgatctcagctcactgcaagctctgcctcgtgggttcatgctattctcccgcctcagcctcctgagtagctgggactacaggcgcccgccaccacgcccggctaattttttgtatttttagtagagatgaggtttcactgtgttaaccaggatggtctcgagctcctgaccttgtgatccgctcgccttggcctcccaaagtgctgggattacaggygtaagccaccgcacctggccatagcatgctaaatattatacataaaccagtaacatagttgtttattatcattatcaaatattgtatactgtacataactgtatgtgctacactttttataaccaccagcccagtaggtttataccagcattaccacaaacaaatgagtaatatattgcactatgatgttacaaatggctagacatcactaggcgataggaattttttagttccattataatcttatgggaccaccattacatatgtggtcccttgttgaccgaaacattgttatgtggcacrtaactgtattcttgtctttaacctaaaaaggttattgaaatgcttaagaacgctttggcatgatcaaattttcattttggaaagcagttctgtctgcaatgtggagaacaaatcagagccaaagtagagaacagctgggattaggtagagtgatgacagaggaatagtttagggattcagggtttattaaggaagtaaaatcaacaaggcttgtgatggtttaattgtgagtgaaaaggagctggccttgttgggtcatagatttctatctttattcagtgggatagagaacagtggaaaagggcccagatgaggagatgaggcacctggtgatgtataaactggacagtggatctcccagagacaatggtaattccgtgtgacaactgctgtgatggaagaaatgcaggctcctatgggaacactagaaattggtaactgataggtactagaaggcttcctagaggaggtggtgctcaaaatataaataaaagtcatattagtttatgacaaagctttctctgaaatgctgtaatgtggttttctgagtttttgagaaggtaatgacttctgagccagccaggaaggcttcagaaatgtgctaaaccttgaaggatgggaaaaacttggatttaggatgggtagggtggaactaccctagggaatgacagaggcagagagtaatcaaattgccagttcagttaagaaaacttggagaaagtactagaaagatgacaggtcagggcctgtggaaagctgtggttctataggcagtggggaacctcttaatgttttgaggaaagaacattaaactgactactttctgtaggatggacaggaggaagagaaggcattagaggaaacataaatgtattctctactttgaatctaacactagatgcattgtatttttgtctgattcttcctctgccataggaagggggtgaggtggggtggagtggagtggaggttgcagtgagccaaggtcgtgccactgcactttagcctgggtgacagagtgagaccctgtctcagaaaaagaaaaaaaaaaagtttggcgaggtgtacaataaaagcacgccagaaagagacactcacaaaacaataaaattttaatatttcaagatgagttaaaagacattaaggaaatgatataagccgtggaaaaaccacataaatcagaattagaaaatctcagaaatgagatgatagtaaaagtcacttcacaacgtagggccagtttaccttaccaatgtcagctcttgccattttctacttcctgccccataacacttcacacatacctctgttgtagcccttttcttataaatttataatgattagagtgtcttcctttccctgattataaactctttgaggcttaaactgagtcttcctccaccttgtactgctaacatgtttttagcatagtatacttggcatattgtacttagcgtatggtaggtgtccagtacctgtttatcaaatgaatgactgaagccctgtactaagataggaggagtcgtactaagataggaggagtcaaaataagaaggatagaatgaatgtgaaagatgtttggaaaaagggattgatgggacttggtgactggatgggggatttttgacttttgttgaccatgtcagccatagacatgtccacaaaacttaggaatgaggagaagaagctggctcaattgtggagtaaatgataagctaaattttagatacggcgagtgggaggtgttggtgagaccctcagtggatctgcccagtggtttacgtgcactgaaccttgcaaggtaactgcagagagactagatcatgtatctatctaatccaaaagaccartatataccaaacccggcaggcccatttgtttcctgaattgctataatgtttatctctttgtttgcagcttggcttgtggagatgttgaaggaaagtttgatattttattcaatagagttcaagcaattcagaagaaaagtggaaactttgatgtaagatgtttgtttttactgaatttaattttacctttgtagtcayacataaaaataaagtttgcactcctttaagtcttgattgaacacataccatttttgttaaattgarttcccttcatgagcataggaacttagtagctgctgagtggctgggggagggagacctatttactgtttactattgatctttatattttttgaatttgaatattgttactttatcactgtacaaaaaactgaaaacagactagcaacacttccctaagtgattctgacctctgggtttgggaagcacagatctatttcatgaatgtgatgaggattaagtcaggtaacatacataccaacccatcacaagcttaaaagctctatatgaatgttgtgtatggttgccaactagactgtaaactcctaagagtacagaagagagtattccaggtatgaggataatttgttcattgggttaaaggttgggtaaagacaacaggcaggaaatgtgttttttataccttgtatttctcagattctaatattttaagtttttttgtttcacacggggattctttaaagatctatttctatgtgactgtatattccagggaaggatatgtggagagagccatgaatggcagagtgggactgggaatttgaggagcacttgaattctaacttactttaaaagtttagttccttgactctctcttacccatctctaacttgaatttgacagccaaagagccaaaacttaataattcatagaatcagtaactgttaacagttgctgctaaagaattgtatattgaaatctgcaaattgattaagaattaaaaactgatttgaaactattaaataactagttgaatattactatcaattatgtactgtwtgatattttaaaatctcatatatctgtttaaaaaactcattttagctgctgttgtgtgtaggaaatttctttggctccacccaagatgctgaatgggaggagtataagactggcatcaagaaaggtatagaaattatttttatttaacatatgatttctaataaaatttcaagggccagagttcttgcagagttgtttttcattatttaagaatttaagagttattttcagtatttaagaatttaagttgcttttcattattaagactatccggcgcagtggctcacacctgtaatccccgcactttgggaggccgaggcatgtggatcacctgaggtcaggggttcaagaccagcctggccaacatggtgaaaccgtgtgtctactaaaaatataaaaattagcagggcatggtggygcatgcctgtaatcccagctcctcgggagactgaggcaggagaattgcttgaacctgggaggcggagattgcagtgagccgagatygcaccactgcacttcaccctgggcgacagagcaaggctctgtctcaaaaaaaaaaaaataaaataaataaaatagccaagctacaaggttgggtgtagtatatccttagtggatagctgttccacatttaggattgctaaatatggggaatgtgaatgcatggactatttacttttaatataagtattttttctatagagaggcatatcttaagttctaaagcagatctggtaactatatggtgtcatgtctgtttccctcactagctcctattcagacatatgtgcttggtgctaataaccaggaaacagtaaaatatttccaggatgctgatggatgtgaattagctgaaaacattacttatctgggtaagctgatacttgttgtattttttttttgttttttgttttttgtttttgagacggagtcttgctctgtcacccaggctggagtgcagtggcgcaatcttggctcactgtaacctccacctcccgggttcaagtgattctcctgcctcagcctcctgagtagcttggattacaggcgtgtgtgaccatacccggctaattttttttatatttttagyagagacagggtttcaccgtgttagtcaggatcatctcgatctccttacctcgtgatccgcccacctcggcctcccagagtgctgggattacaggcgtgagccaccgcgcctggccgatatttgttgtatttgtaatgaacataatatagtgttctcaggaattagtctcccaggaaatttttggctagatttttcagtgattgcagcctgagataatggggtttggagggttttttcccagagtctgtatatgtgctgctgtgcccttaggacaatgcctttaggacagtggcattttttctttattatttctaccacttagccccaatatcgttgcgttcccacaacccggtacacacttgtttagccaactggagggataaactccttgtctatagtatatgggatacttaaggtataaattatgttcacacaaaggaaatttcatgtatgtggctttaccatacaatcttgctaggtatatacagcttacttgttaatgagcctcccaactatttatagctctaggtttcactctaaggttttggcaactcaggtttttagtgctgttctttgggggctttttactctttttttactctcctttttctggttctaggtacactcttcagttccagcttaaagttgtttcctccacagccctctgtattgcttttagtggctctttcaatgtctggctgttttcaaaagcactgtcaaattttgcttttgttttccccccacctgctggcagtctgctgcctcttagatcattcaactcttttttttttttttttttaagacagtgtcttgctctgttgctcaggctggagtgcagtggcatgatctcggcttactgcaacatccgactccctggttcaagtgattctcctgcctcagccttccgagtagctgggattacaggcacgcactaccatacccagctaatttttgtatttttagtagagacgggatttcaccatgttggccaggatggtctcgatctcctgacctggtgacccgcctgcctcagcctcccaaagtgctgggattacaggtgtgagccactgtgctcggctttttttttttttttttagttgaatttactattcttcacatttcctccttgttggtcttatttctctagaaaacttcttcatttcctttgctgtaaatgtcctctctctccttccccatcatagttcatcttggcctttagtctttatttggctatggccctcccgttaccagtcttattttgcactaatcctgtgggacttctttaagcaaaaattgaaggaaggactttatttgttttgttgttttaatatggaactcttcatgaatttgcatgtcatccttgtgcaggtgccgtgctaatattctctttatctttccagttttagtatatgtgctgctgaagtgagcactgtttagttttaactacacatatcagatacgcattttgaaattctgttgtagattttaacatgagcctgacttatgcagttcttggtatagtttgtagatttggattaagggcattactgtagatatttggcagccattttactatatgaatttagtgccaggaaaggaaagagcagctaaggtacttgggttatttctgtgaaatagattttttggatccagtaggaggatcaagcartgaacttggtagtgaacatgtgatagtgagcttgaaatactggtaggacatccaacatatagttggaagtgagagttattattattattttttgagatggactttcgctcttgttgcccagactgaattgcaatggcatagtcttggctcactgcaacctctgcctcccggattcaagcgattcttctgcctcagcctcctgagtagctggggttacgggtgtgtgccaccatgcccrgctaattttgtattttttagtagagacagggtttcaccatgttggtcaggctggtctcgaaatcctgacctgaggtgatccagctgcctcagcctcccaaagttctgggattacaggcattagccactgtgctggtccgagagttctttctagagtatcagtgttgaagagtataggctttggagagttggtcccataatgatgaaaaatagagctgagaagaggatcaaattattaaggaagaaatacaatcagaagggaagcaggttgatgatagtaccttggtgggtggggatggtatatcttcatctagggggtaggaacaaagacataaaagtgcttagaggactgtttgagaggtaaagatattgtcaacttcatggaatctactgaagataacatagtttcaggagaacattggcaaatatagggtgacctttaagagagtgatgggagagggaaactgattgcagggggttaaggaactaataaagtaggctgggcgtggtggctcacacctgtaatcctagcaccttgggaggtcgaggtgggcagttcacgaggtcaagaggttgagaccatcctggccaacatgatgaaaccccatctctactaaaaatagaaaaattaactgggcatggtggcggtcacctgtagtcccagctacttgggaggctgaggcaggagaatcacttgaacccgggaggcggaggtggaggttgcaatgagccaagattgcgccactgcactccagcctggcaacagagcgagactccatctcaaaaaaaaaaaaaaaaaaaaaaaaaggtaaagcacttagcatggatgactcttcagaaattcaaaactgaagaggaggaagtttcttagtatgtgtgttcattttggatggcgatgattgagcatatttttttctgaacaaaaagcgccagctgagtagactcagtagatgaaagggaagtgaaaattgatggagcaaggtcttgaaggcaacaggagggaatggaaacaaggccacaagccaggaataaccatagaagagagtggcgtcttaaatttttcctaaacacttgttctttccaaatgttttccttcacttggaagttgctgcctgcctccaagtagctgggactacaggcacacgctgccatgcctggctaattttttgtattttagtagggatggggtttcactatgtgcatcttttctagactgtagcttccttagaactgtatttttcttcgcattgccttttcctgtstccagatgtctgcatttaagtccatgtagaatcttctctagaacgcagaaagccttttccctaatcttctcttcccaactttttccagtaatatttgtaaggcacctggcataaacatactggcccgtgggctccagcagcctccacgtagggctgttcatatttactgagcaggaatactgttgtagccattcaccattgatgcctagcagccagaagggagctgctggagagtttacacttcagacatgtaaaatggcagggacataggagagtcatgggagattcatccccctattgatggcttttcattctgcaattytgactaaaatttgttcatttttctttgaacccaggtcgtaaaggtatcttcactggaagctcggggctgcagattgtgtacctcagtgggacagaatccttaaatgagccagtaccaggttatagttttagtcccaaggatgtgtcttctctgagaatgatgctgtgtacaacctcccagtttaagggtgttgatatcttgctcacatccccatggcccaagtrtgtggggaactttgggaattcttctgtgagtagtgtttgtttagttggaatttctaaaagcaaattgcactggcttgagttgggacttttttcttttcctgtttatattgagtattttagctcttgggtaccttttattagaagtcttctgtgaaaattttcaggattctaaaagttctgtcaactgatcaaagcaaaagttaatttcatgaaagtgtgattcatagatgagactgctgaaatcttaattataaaggaatggttttttatattctctgcttcaagtgccctttcctaagcctcttaatgttttgaggcttcactgatttttttgttttttgttttttgtttttttttgagatggagtctcactctgtcgcccaggttggagtgcagtggtgcgatcttggctcactgcaacctcctcctcccgggttcaaatgattctcctgcctcagcctcctgagtagctaagattataggcatgcgccaccacgcctggctaattttttttttttttttttgagatggagttttgctgtgtcacccaggctggagggcagtggcgccatctctgctcaccacaacctctgcctcctgggttcaagcaattcacctgcctcagcctcccaagtagctgggactataggcgcacactgccatgcctggctaattttttgtattttattagagatggggtttcagcatgttgcccaggctagtcatgaactcctgagctcagacaatctgcctgcctcggcctcccaaagtgctgggattacaggcggatttttttgtatttttagtagagatgggatttcaccatgttggccaggctggtctcaaactcctgacctcaagtaatttgcccacctcagcctcccaaaatgctgggattacaggcatgagccaccgtgcccagcctaatttttgtatttttagtagagacagggttgcccaggctggtcttgaactcctgcgctctagtgatccacccgccttggcctcccaaagtgctgggattacaggcgtgagccaccatacctggccagattttaatattttatgagtaatcttgaaaaggatggtacaccaggagtgacaactatcatggggagtgaaacrctacactggtggaagtaagcctaaggaagattttgaaaaggttatgtgtgagggcagaaaacactgggtgagcttcattgaagggaaatgtaagaatgcatttsggaacaaatctccatggttggattcaggattatcagtgatgatccagaagtggagcctgtataccaccccttgccagtttcagcaccatgtgtccatgaccaaaaaggccaacaggataccaggcattatcaaggaggatgctctcttcctttttgacaaacccatgattactctttacgtagaatacaaggcatagagctggttggagcacaaggatatagcaaagctagggaagatcgagagaagggctgctaaagtgatgaaggaagagagaaagacacatatgatgctctgtaaggaaggatgakaaaatgaggcccctttgttttgcggggagctaaaaattgattttgatcaaggcttataaataaccatacagtatatttatggaggagaaaagtatagttcaccagtccctaagatgctaggactgacctcaaagctaattccctgcccttcagcagaaacctgaaggaaacaagcataagacaaaaggaaattcctgctttacgtagtggaaaacaaactttgttagcttatttccaagtaataccttctcttagaatagagttcataaataatgctgtgggtgagagatcacttaattggttgttaacagaatctggggatgttctgggagcaagaataactttgagcaaacttcatattacttaagaagggtgtggttatgcccttcctcaaactgccacttccttgactgaagcaaaataaaggattatatgctggtgatgaagtccttgaatactctataccagatattctgtggatcctaggagccctgaagcctagcttttcgctttgattttctgaattgactatgactgtctggacccgtgaactacagatgcactacgtaacaaactagaggctgggcgcagtggctcacgcgtgcactttgggaggctgaggcgggcggatcacgagatcaggagtttgagaccagcctggccaacatggtgaaaccccgtctctactaaaaatacaaaaattagccaggtgtggtggcacgtgcctgtaatcccagctactagggaggctgaggcaggagaatcacttcttgaacccaggatgcagaggttgcagtgagccgagattgtgccactgtactctagcagcctgggtgacaaagcaagactccatctcaaaaaaaaaaaacaaaccaaaactagaagcccagtctgtgggctccagagggagagcttactttccaaaaaaggttttaataatttgtgttttgggtattgatatggaggagttaccttttaatctctggcttccaacagttgttcctatttctacattcatagtagttcagctcccttatttgttaagattttttctctgattgccatacttatgaaattcaatgtgcagttccttctgtccacatctgtattcatgtataaatttcaaagacatttcaaaatgtcttattatttatttgcatttcttgataacttttggtctgtatggatgactaagtttttgtttactagggagaagtggataccaaaaaatgtggttctgctttggtttccagtcttgccacgggcttgaaaccaagataccattttgctgctttggaaaagacctattatgagaggcttccatatcggtgagtagcatttcattcttcttggctttttgaagaatttgccatggatcttctgtataaacttctcttgttcgtttttaaccatataacatcttggttccatttggttactcagacactgaagtaagtgactctcaagtcattcatcttctctgagtttgttccctaatttgaaatcactttggaaatccttcagtttcagaatcaagaacttgtatcagttttttccttttcagggccaggcatgatggtgtgtgtctgtggttccagctacttggaaggctgaggcaggaggctcgctcgagcccaggagttcaagactatagtgtgcaatgactacgcctgtgaatagccactgcactctagcctgggcaacatagggagccccatttctttaaaaaattttttaccacaaataaatatgagataatgtatatgttaattagcttgatttagccatcccacagtatatacacatttcaaaacagcatgttgtatacmataaaaaatacaaattttagttatcaattaaaaataaatgagagggaaaatttaaaaaatttttttttgtcttttttttttttttgagacggagtctcgctctgtcacctggctggagtgcagtggcatgatctcggctcactgcaacctccgcctcctgggttcaagtgattctcctgcctcagcctcctgagtagctaggattacaggtgcgtgccaccacgtccggctaagtttttttgtatttttaatagagacggggtttcaccatgtcagtcaggctggtcttgaactcttgatctcatgatctgcccacctcagcctcccaaagtgctgggattacaggcgtgagccaccatgcccagccaagaaaatatttttttttattttttttcttttgcactcagaggtggagtttttatttttttaatttttgggggtacatagtagcatagtaggtatatagaggtcaagttcttttttttgagacagagtcttgctctgtcgcccaggctggagtgcaatggcatgatctcggctcactgcaacctccgtctcccaggttcatgccattctcctgcctcagcctcctgagtagytgggactacaggcgaccgccaccacacctggctaattctttrtatttttagtagagacagggtttcaccgtgttagccaggatggtctcgatctcctgatatagaggtcaagttcttaaagaatatactgccaagaaaaccagtgttttacaagtgagagagttaagtaaaagctcagaattatcttcactgataaagggcatggattatccctaaaataacttctttcccttcttttttacaaaagtaatatttacgtgttgctagttaaaaaaatttaagtgagcaagaagagaataccccccttaccataatcccacagcctaatgcagaatcataggtaatacaggtttttctgttaaatctccatatactyattctagaagaatgtcttgttctctaaaaatatactgcgaaaacagaagttttgggaacaagccactcaaaacttacacagttcttaagaatcggaatacagtttttcatagaacatataaaaatggccaatagggctgggtgtggtggctcacgcctgtaatcccagcactttgggaggccgaggcaggcagatcatgaggtcaggagatcgagaccatcctggccaacacggtgaaaccctgtctctactaaaaatacaaaaaattagctgggcatggtggcgggcgcctgtagtcccagctacttggaaggctaaggcaggagaatggcatgaacccgggaggtggagcttgcagtgagcagagatcgcgccactgcactccagcctgggcaacagagtgagactccgtctcaaaaaaaaaaaaaaaaaaaaaaaaggccaatagacatataaaaagatgctcttatcattagccattatggtaatgyaaatcaaaagcacaatgatacaccacttcatacccactaggatggcagtagtcaaaaaggcaaatacataataacaagtgttgacaaggatgtggaggaattggaatcctcacacattgctggtgagagtgtaaaatggtgcagccgctttggaaaactgtttagcagttcttgaaaggttaartgtaagagtcagcagcatggtaacggcaattttattcctgtcccaagataagggaaaacatatgtccacacaaaaacttgtacacagatgatcataatagcattattcataatagctcaaaatgcaaacaacccaaatgtccatcacctggtgaatgggtaaattaaaagtggtaaatatatgatgaaatgttatttggcaaggaaaagcaatgaagtactgacatgtgctacaacatggttgaaccgtgaaaactttatgttaagtgaatgaagccagacacaaaggactacattttttttttttttaattttttttttttgagacaagatctcattctgtcttccaggctggagtgctgaggtactatcaaggctcactgcagcctcaacctcgtgggctcaagtgattctcctaccttagcctcctgagtagctgggactgtaggtatgcaccaccatgcccagttaattaaaaaattttttttgtagagacagagtctcactgtgttgcccagggtgttctcaaactcctgggctcaagcagtcctcctgtctcagcctcccaaagtgcctggcctattttagctttttattacacaaaagaagaggcaatagtaaagtgaaacctcatgtgtccatcacttagcttgaactattgtcaacattttgccaattttacaactcttttaaagccaaaagttggagttttgatggtttctgaagacataatctcatctcttcctaaaacagccttgtgaggtagggattgttgccctattagacggatagatagtaacttatctgaaatcatttgactggcgatgatgaactgaggacctctgctctttttatggccccatagagtccacatattttgtcattgcaaatcaaaagtaaaattgtttgcaattttttgtctctcaaatatgttgtagaaaccatatcattctacaggaaaatgcacagcatgccacccggtttatagctctggcaaatgttggaaatccagaaaagaaaaaggtaaagatttacctatttggtggarggttgatattcatggtctgcctgataaatgtatctcttgtccagtttagcattcagatcttctcttctccctgactgcaaggtctcagcagtttcggagactcctttgtaaaggtatggtaatgaaaggtcaagtctctttgggtctttttgtaggagagtttaaagaagggtttgggaaaataggcccagaggaataaaggcaaaatatcaaatgaacagtgttcctttacttccacatctatgtggttgtctctatgggtatttgtgaatttgccctcagatgcttgcttacttctttagcaacttcatttagctgaaataagaaaaccccaaagagctgggcatggtggcccacgcctgtaatcccagcactttgagaggctgaggtgggcggatcacttgaggccaggagtttgagaccagcctggccaacatggtgaaaccccatctctataaaaaataaaaaaaattagccaggtgtggtggggggcacctgtaatcccagctactcaggaagctgaggcaggagaattgcttgaatgtgggaggtggagactgcagtgagctgagatcgggccactgcactccagcctgggtgacaaagtgagactctgtctcgggaaacaaaaaaaaagaaacccagaggacttacctaagctctccttagggctaagatttcctgagggaaatcttagtgatacctggaatctatctttgtattggaaaacagtgcagttgatgaaaagaatataccagaaaaataggttgtttttctcacttctctgagagtatttctgatttcccagggccaaaactaacctattgtggattgagacagctaaaataagaacagttagtgaagtgggaaaataggcagataaagagtctgaagattattccactatcacatgccatagacaatgcatacaaaagataagcaaatcgatattttgtttttttcataatatttcaagctttttttgggggagggggcggatctgaagtgattttgcctttatttccttcactttaagccaatcatgaaatttcatagtgatttctagggttggggcagaaggaagacagtgttaagaatcatcagggctgtggcccagttggcctgcggaggtgcaggcagggtggcccctcaggggcagctggaggagcatggactgccccgctggcagggagctgatgttcccagagtataagagctggaatgtgatgtcctccacagcttccagcttgcgcagctctatcaggctgttccctgcggtggccagtgagttggcgatcagctctgctgccttggaatcgccctcagcagagatgatggctgcctttttctgctgctcagccttttctgccacaaatctggtgctctctgcttcccgctgagccacctgtttggcttccactgcttctgtgaactccttcccgaaggtcagatgtgtcaaggacacgtcatccaggatgagcccaaaggtggctgctygctctrtaaggtcgttgctcatctgcctggagaccagctctctttaggtgattagttctccagcatcaaagtgagccaccactgacttgaggatctcagtagtgatggacagcagcacacgcttatcataatcctcttcaatgctggtcaagatgcgaggaagctggctagcgacaggcccccatgtgcaccgtgatgttgacattctgtaaatctttgctatcagtgatgactggcacattacatggtcaagaacagcagtcaaagataataggtttgtgtacccatggaatgagaaagtgagtcccttcccctaccacagtgttctgtactccatggaatcggtcaaagatgacagctctttgctcagcatccacattatatagggcagagttcaccacgtctcctgcaacagctaaggccaggccaaacttgccaacggactcaaaacactttggcagccatgttttcttctgctggaccctttcatacctgcttccactctgacctccacataaattccccagcctattttcagcttttttgcccaattcttagcaaatgtagatttgtaatttttcttttaattgccctttcaaactgaataacacttagtattttcagtctgttttattctcagggacatgttagcctcagccataagcaacttatactttcgtcaaaaggtgtgcacattataaaatttggcaagcattgttaaattcatctaaaaactttgttccaatttatacccctaccccagcagtgkttttttttttccccctccatatttctcactggatcaagtcaaagtttttgtttgtttgtttaagatggagtctctgtctattgcccaggctggagtgtagtggcacgatctcggcttactgcaacctccacctcccatgttcaagcgattctcctgcctcagcctcctgagtagctggaactataggtgtgtgccaccatgcctggctaatcttttgtatttttagtagagatgggatttctccatgttggtcgggctggtctctatctcctgacctcaggtgattcgcccgcctcagcctcccaaagtgctgggattgcaggcatgagccgccacccccrgcccacgtcaaagttttattaaagtttttgccaatgtgataaatgatatataattgttacttagttgcatttccctaatcagtagtaagtttaaacatctatttatatcttatctaaagttttcgatatctgtggcattagtgcaagattccaaatatttatatgaatatttattgctttactgctagtctcctaagaaaattttattagcatatatagcagaatttgtataatatcagagagagaaacactaagttcgtttgtaattttcattaggaaaaataaatggcagtgccacaattctgtggacagagtacacaaagataagggactcagagacagaagcagtttgtcttcaagggttatacagcaagtccctctgggccttgtagtgacagttgtcactattccattatccgagtgagaactcctggtttgtgagggtgggggctttgatttcttgttcatttctttgtcaacccttggtgagcccctgcagaggccactgaattggcatttgatttactgtttactctctgagctatggatgggctggttgctgttcttttaattttactgagtttcacatgttttctgtgaaatcttcacagtaaaataggttgattacagttgggtaaatagtatttcccctaatgtcattatgttctttttctctaaagtatctttacgcrttcagtattgttcccatgaagctaatggatgcagcagaactggtaaaacagcctcyggatgtcactgaaaacccttacagaaaatctgggcaggaagcatccataggaaagcaaattcttgcccctgtggtatgttctgattgagggttggcatttttatatgtgttcttttcctagttatagtttagtacataagacaagtttaatcgttagaatctaaatcttttttttccccttgggaaatcatgatgrtgtttagaaaatcttagtagatttcarctaagcttagtgttttttattgtagtttggggttaacagtttgatacattaggtctttctttgtccaaactggattcagacgtttggggttacagttttatttgtaaagtctttgtctaaagtgattatctgttcttagctctttaggcaaggctctagcagcttcatagcaatgtaatttgtgattttatgatgattgctagtaggaaaataagattcactctgaagaaattttcttaatagcagagttttctcaaattaattttttccccactaaagcaaggaatgtcaagttcccttactagcatgcacggtctgctttctcagacttttctttctttccaagcagccttctcatctcttaaggctgaattaggcttgtttgacctgtgaaattgtatgactacactatgtccctgttgagagaaaaaagaaaagagaatttaggtgggttcatgttctgctttaggcaagaattactttataacttgcattttaactcgtttttccaaagagatgaatttggcagtagtttggataagtgttgatgtatgactgagacttcaggcatcagaactgggaagatattttgcttccctagagtgtgcagaaaggactgagaagaaagataggtatggcatggcaggaatgttcccttgtatgtgagtggtcggctacttatctaaaggttagttgaataacatttaatcttctgcttttggccattccaggaagaatcagcctgtcagtttttctttgatttaaatgaaaagcagggaagraagcgttcatccacaggtagagatagcaaatcttctcctcatccaaagcagcctcgcaaacctcgtaagtacctttattccagaggtttcttctatgaacagtaactgttattttggcttttctttggaaagcagcattgctaagagagcctcttctggcaggggagaattgtgcaatgagtcattaggaccaacagtaaaaataaaatataaacatggccttggccaggtgtggtgactgcaccatcttatattcccactggcaatgtatgaaggtttctgcttttccacatccctgtcaacatttgttatagcaatagccagttttacaagatagctccctcttttcctgtctcataaataggtatggttctctaggggtgatgcttttatatacttcttggactctgtatttttagcccatctacttgagagtgatgagttccttttgctaattaccatttaaagcaattttctttgtcctaaaaaggcagtcttctgttgcttatatacccatattgggataaaagcgttgatattcttggccaggtgtgggggctcatgcctgtaatcctgtactttgggaggctgagccaggcggatcacaagttcagaattttgagaccagtctggccaacatagtgaaaccccttctctactaaaaatacaaaaattagccaggtgtggtggcacggtcctgtagtcccagccactcaggaggctgaggtggaagaattgcttgaacccaggaggcagaggttgcagtgagccgagatgatgccattgcactccagcctgggtgacagagtgagactccatctcaaaaaaaaaaaaaaagttgatattctttttatagcttcagattcagaaactagagctttatgaatttttatctagaattatgtaatgctggaaactgattcacactaactgtaatcccagcactttgggtggccgaagcgggtggatcacttaaggccaggagttggagaccagcctggccaacatggtgaaaccctgtctctactaaaaatacaaaaaattagcaaggcatggtggcacccacctgtagtcccagctcctcaggaggctgaggcatgagaatcgcttgaacccaggaggcggagattgcagtgagccaagattgcaccactgcactccaacctgggtgacagagcaaggccctgtctcaaaaaaataaaataacgggccaggcgcggtggctcacgcctataatcccagcactttgggaggccgaggtgggcggatcatgaggtcaggagatcgagaccatcctggctaacacggtgaaaccccgtctgtactaaaaatagaaaaaattaaccaggcgtggtggcagacgcccgtagtcccagctacttaggaggctgaggcaggagaatggcatgaacctgggaggcggagcttgcagtgagccgagatcrcgccactgtactccaccctrggcgacagagcgagactccgtctcaaaaaaaataaaataagaatggcctgacttcgaggctgttctgaggcgcttcctgtactatggaaaaagcacctttcctttgtgtctgtaaaacataatgaggtgaagagcctccaaaaccaatatgggttcataaaataatagaatgatcaaactcgaaggaaggactttaagagtgtttcattgagattctctttcttcatctttttgtttcacacaagaagstgaccttgggagggtaaattttccagggtcatggctaatggcatagctggggctttaattggggctcctgacacccagttcagtgttcttttgttgtagcctattgccagttatgtgctactttagtcagtgtgtgattttgcacttgtgggttacctacctgtggattggttacaaattctaatggaagtttaatttcattgaaaatgttcatagggggtcgtagtgaggagcacaggctcagcccattgtggcagtgttgtataccagtcttttcaggatataaaaatcagacaaagctgagttctgtggggtgattatatgctstagtgcttggaccatagtaacacctggctttcttttacatgaagctcagcctccaggaccctgctggttttgccttgctagccctgaagtggaaaaacatttggtggtcaacatcggcacacatgtgagttacttccttggactttatagagaaggagatgcctatttgttttttattaactttattgaggcataatctacatataacatttacccatgtttaagtgtatgattcggtgattttcgtaaggttactgagttatgccaccatcacgtggtatagttttagaacatttttatcattgcagtaagatctcttatgcccatttacagttaatccctgttcccaactttagcctcaggcagcaactagtctacttactatctccatagtttgccatttttggacatttcttataaatggaatcatacaacatgtggtcttttgtgtctagcttcttttacttagcataatattcttgaggttcatccatgttgcagcatgtatcagtatttcattcctttttattgccaaatcatattccagtgtatagatgtaccacatttcgtctatatctgttcatcagctgatggacgtttgggttgtttctactttatggctattagaaataatgctcccataaaatatctgcatgcaagtctttgtgtggatatagacctaggaatggtctatatkttggatagacctaggaatggatttgctaggttatatagtaaatttatgtttaacttttaagaaactgctaaactgttttccaaaatgactgcaccatcttatattcccaccagcagtgtatgaaggtttctgcttttccacatccctgtcaacatttgttatagcaatagccagttttacaagatagctctcttttcctctctyataaataggtatggttctctaggggtgatgcttttatatacttcttggactctctgtattttttagcccgtctaattgagagtgatgagttccttttgctaattaccatttaaagtgattttctttgtcctaaaaaggcagtcttctgttgcttatatacctgtattgggttaaaaatgttgatattctttttatagcttcagattcagaaactagagccttatgaaatttttttttttttttttttgagatggagtctcgctctgttgcccaggttggagtgcaatggcrtgatctcagttcactgcaacctctgcctcccgggttcaagtgattctcctgcctaagcttcccaagtagctgggattacaggcacctgccatcacatctggctaatttttatatttttagtagagacagggtttcaccctgctggccaggctggtctcaaactcccgacctcaggtgatctgcccgcctcagcctcccaaagtgctgggattacaggcgtgagccaccacccccggcctatgaatttttatctggaattatgtaatgctggaagctgaktcacactaactgatcacatcaaagataaaatttcagttttgcttagtagtggagggtgtagcttactaatgacaggaatacccatattcacactcctggtgtgagtatctaggaacccaagatgatgatgatatggttgtttggtaagcattgaatcagactatgagaacgggatggtcttgagtatgattttattcaggtggtggaaagcttgaatgtgtgtgtctcatgggaaagtcattctatttcacatttccccagatacttttgcttgggtagggctggattagacattaaataataccagtgtttgastctgatttccctgggttttctgtagaccattgttctttttcattcatttagaatgaagaaaacttaatttttaacactatagtcaccagtgactagaattggatgttccccaagattcctgaggaaaatatttataagtcatttttgttttgtgacagttttgggaggtggggcctaataagaggtgatttggtcataaggactctgccttcatgaatggattaatgttatcacagtagtgggttatcatgagagtggctttgttaaagtgagttcaggtccccttttgcttctttactctcaccctcacttgcccttctgccatgggatgatgcagcacgaaggccattgccaggtgccagtgctatgcacttcgacttcccagtctacagaaccacaagccaaatagatttctattcaaataaattatagtctgtggtattctattatagcaacacaagatggactaagacaattccttaagtgtgtagtgcttctgaagacaggtgccttcatccatttctcattgatttgttctacttttggtttctggggttgatcstttcaacttatcctaacaatctgaggaccgttttttgtgtcttccttcctgtagactgactagagtctcaatttcatcttacactttaaggagttacacttctgcctgtgttgtttccacctgaagagtctcagtcttttacattttaaaaaatgtcttggccgggtgcagtggctcacgcctgctcacggctgtaatcccagcactttgggaagctgaggcaggtggatcacgaggtcaggagttcaagaccagcctggccaagaaggtgaaaccctgtctctactgaaaatacaaaaattagctgggcgtggtggcgggcgcctgcaatcccagctactcaggaggctgaggcagagaattgcttgaacctgggaggtggaggttgcaggccaagatcgcgccactgcactccagcctgggggacagagcaagactctgtcacaaaaaaaaaaaaaaaaaaaaaaaaaaaaggcttaattagtggcacactcctgtctctagggggagcactaatgaagtcaaggccggtgacacaactgagccatagaacctgtggatgaagtcttcagtggaataagagcaaacttgagaagctctagcttttatagcagtgccctttttggatgatctcttttgcatcttttttcgtctttggattagtttatgctatttttctctcccacacaatttgtatagtaagttaggctttgaattgccttctgtttgggaagcttcaataggttcaagatcacaygcaggagataagagatttggaatgtgtgacatagctcagtgctgctctaggcctcagtgagaagtgacttttcttttccattcatctttctattgtccaggttactctaactcagggtgtgggcctgggcaacaatcaaggaaacctgttttcttctcatctaggcctgaaactagaggggaaaaaggtcttgtttgtggcccaacccaacatcccaagtaggccacatgagtatttcagcctagagtctacaytgtccttaggtagaaacctcttacaaacctgtaatgacctttgggtgtctgtggaagagtttgggatctcctccctgcaattattctttttgattgcctttttttgttttttaaattttttccctggctttctctttgtcgtgccttcctcaaaggtagtacatagaattgtgctgatggtccatagccacagattagtaaaaagggggaagggctgctgagagtgtaaaataattattgcaaaatcaatgcattttacttacggggagaaccatttatccaggtcctatttacacatggttagagataattctagtatagaacagattagaaggtgagagtttgaaagagagaggagattaggcaagcgtgaaactattcacaaaaattgcaagtacaggattagagatggtgcagaggagctctttagtttagacatcattacctaaagaatgcacatcataatagagaagytgatgtttatggcagtgaccttctgacaaaaatagctagacgactcaggcttctagagtaaccttttaaacaaatacaatataaagtggttattatacaaataaaaaaaagtttttagtgcctgtgaggttttcatcaactttagtcatctggaaaattaactttgtcaatatgctcagtcctctctgccaaacaaatcaaggacaatcatgctttagtatctttccaatacatatcctgtcattctgttggactttcttattatagatgagaagtgattccttccttcagccttaactttgagcccaccacactaagagcatagttggaataattttttattttttttccygagacagtcttgttctgtcgcccaggctggagtgcagtggcacgatctcggctcactgtaacctccgccttccaggttcaagcaattcacctgcttcagtctcccaagtagctgggattataggcacgtgccaccatgcccagctaatttttgtatttttagtagagacggggtttcaccttgttggccaggctggtcttgaactcctgacctcgcgatccatttgccttggcctcccaaagtgctgggattacagtcatgagccaacgcacccggtctggataattgttttctaamgtatctatatttgcctgtactggtactcattgggcccttctgtgctcactcatggcatcttcccatcagagaatatctgagtggtagaccattcttgcatgttttggtttttacagaaatatttttagttgccattaaaggctgacatccattgttggaaatcattcttttctgcctctttggatgcatctgagtttgaggttttactttccttctaccccattaggttgtatgtttgcttttgttttgtagaatttagtcagcagsttaaggcttaggaacattagatgctaatcatgccatcttagctttttttgtgagcccaaggagtatattcgggggtgggggtgggaatgaaagttactggggaggcagaaaggggtcattttttttttttttttttttttggagacggagtctcgctctgtcacccaggctggagtgtagtggcgcgatctcggctcactgcaacctctgcctcccgggttcaagcaattctcctgtctcagcctcccgagtagctgggactacaggcacatgccatcacaggcctggctaatttttgtatttttagtagaaatgaggtttcaccatattggtcagcctagtctggaacttctgacctcaggcggtccacctgcctcggcctctcaaagttttgggattacaagcgtgagccactrtcccagccgaaagtggtcattttgaaatcagaagttgtatctttttgtggttgagggtgataaaaactgaaaaactgttttcaagtttggagcatgggagggaaaacccagcgatttgttctggtctccctcagctcagtgtgtttgaagccaaaagcctgcttgtgtgcctctcccaattcatttgctcctagttcatttgctacttgcatagaaattttcatgccgaatctcactcttcagcggatacctgagaacattgttgctacaatctctaaaatcagattttttcaagaaagaatttttattaataacctcaagtacttttcgcctacaccctcaggctcactttttgtataggyttttctccctggagaatcctacatgctgtattgatgtctcaattctgtgtgctgcttcttcagtgctaccttgccctggccaaaggaggcttatctgatgaccatgtcctcatcctgcctattggacactaccagtcagtggtggagctttcagcagaggtggtagaagaggtggagaagtataaggccactctgagacggttctttaagagtcgagggaaatggtgtgttgtatttgagagaaattataagagccatcacctccagctacaggtaggtggtctgttcatagaaacttggaagggcgctatggggactttgatattggtaaataagtatttaaataggctgggcgaggtggctcacgcctgtaatcctagcactttgggaggccgaagcggttggattgcctgagctcaggagttcaagaccagcctgggcaacacggtgaaaccctgtctctactaaaagtacaaaaaaattagctgggcgtggtggtgcatgcctgtaatcccagctactcgggaggctgagacaggagaatagcttgaacctgggaggcagaggttgcagtgagccgagattgtgccactgcactccagcctgggcaacagagcgagactccatctttaaaaaaaaaattatataaagtttagctttaatatgtaaaatatttaatatttttatattaatatttaaataacattcatttaaaaagtttttaaagagtatctggtggtaaccccagagacttcacagggaagtgtgtggtcagtacatgtaaacagcatagatagtaagttccttgtttagaaaaggaatgggtagttgaggaagttccaaggaagatgtggggcttgctggataagaatttggaagaaagtgagtattttgtgtggaggcccagcatgagggaaagcttagtggtaggaaatagtctcaaagcctgcatggggctagcagctcagaaaatcagattgtaaatcatttgtagttgtggtggttttctttttggcacatttgttaagttttcaaatgggcctaactctgccacatatataatatcggagatggcaaaggcttgtgacggagatatctctcttaagcctttcctgcatcagagaatggctcccacatgtgtcaggctatctcataagtttaagtccttacagacaggctgacacaggcttgtctggcctgaggatattctgtgctgaggggtgtttctccacccctgtgatggatttgctacttctcagagactrtgcaggcacaacttctctgggacctgcacaaggaatttctcctgtctccccaacccccaggtcattcctgtcccaatcagctgctctactactgatgacattaaagatgccttcattacccaggcacaggagcagcagatagagctgttggaaatcccagagcactctgacatcaagcaggtgaaacaggggatggtgatattcagggaagagtaaatatctgttttttttgttgttgtttgttstttgtttgtttgtttgagacagagtcttgctctgttgcctaggttggagtgcagtggcatgatcttggctcactgcaacctccgccttccgggttcaagtgattctcctgcctcagcctccccagtagctgggactacaggcatgcgccaccatacctggctactttttgtatttttagtcragacggggtttcaccatattggccaggctggtctcgaactcctgaccttgtgatctgcctgcctyggcctcccraaggtattacagkcatgagycacccacgcctggcaagatctggtttttgacatgttgagcctaaggtttttgacatgttgagctatcaaggcattccaaaaatgttattaaataggcaatgggttgggcatggtagctcacacctgtaatccaacactttgggaggctgaggcgggaggagcacttgaagccaggagtttgataccagcctgggcaacaaagtgagacaccttgtctctacaaaaaataaaaaaataagcttggcatggtggcatgtgcctgtagtcttagctactcaggaggctgagagtcaggaggatcacttaagcctaggagtttgaggatgcagtgaggtatgattgcaccactgtacttcagcctgggcarcatygcaagaccctgtctctaaaaaaaaaaaaaaaaaaaagaggcagtggacaatttggaactagagcactgggtattgactagactggagatgaacagggcattactccaaagtttagtgctttcctgggaagagcaagaaattagaatttcctaaggtaggaacttagaaggatagacgccactgggaggatattgttagtatcttccagttagactttttaagccctagttccactaagtggcttgggatctatagcaacatacatatctttttttcttgtgcatttagactgaattatttgcctagagatgaactcagattatagatttttaaagcattattggacatcctcatacaactctgtttactttagattgcacagccaggagcagcatatttttatgttgaacttgacacaggagaaaagcttttccacagaattaaaaagaattttcctttgcagtttggaaggtatgtttttcttcttttcaatgtattttcactagacctgctatgaacagagtggtgggctacatgggacaattgataaaaagctaaattgtaaacagtccttgccccagaggacccatggtcttagggcagatgtttwcatatatgacagtaatgtaatgtagaatgtgaagagtaccatgacagagttttggagaacaatgtgctgtagaaattcagaaaagggacagctcatttctagttggtgaaagccttcatgaaagtggcaaagttgaacctgagaggcatatttagagggcaaagattgaggtgagggcattctagccagaagtgctagggaactttaattgagcacatactctgtgccaagaactgtaccaagaactttacacatacatgactcatttaatcttcataactctgtaaggtaggtactgtcatcccgatttaccagtgtggaaaatgaggctctagagcagtgcccggtagacttttcacaacgatggaaatgctcaaatatctgcactgtccaatacagttgtgactagccacttgtggccmctgagtgctgaaatgtggctaatgtgactgaggaactaaatttttgattttatttaattaattagaatttaaatttaaatagccatacctggctaatggttaccccactrgatagcaggctgtagagagcttaggtagcttgtcctagtcacacagtggtaggttcaaacccaggcctgttggacctcaaaacttgaggtcttaacctcagtgttctacagtatggtaaaggcctagaggaggcttcagttctgttcctcgtatcaggcaaaacatgactgcaaaaccatagagggagtaacataacttaagcaaagattgaagatgggaagttgctggcaagaagatacagtttgaaggggagtggaaaatgtgtagaacrgagtatctgatgctggtgtctgtgatttgcagctgttttttctcccctagttaaaaatgggctttgagtgagccttgaacctgtcttggactaattcagaaagcctccaagagattgcccccttagataagtccagtaaatgtagttgtctacatttttcaaaaagataaatgggaacaagtgtgctacgagattcagacatctgacgtgatgttttcgttgttgcctcagcaacagatgcggttatgaacattgacaacataagcacacgattgcagatacacataggcgtataaagcacacaaaaagaagattctctgaatggttttgtgcttatgatgtattttcaatattgagtaattatcaagatactaatttatagttatatagcattttatagttaacaaaatatttgaaatggcatatttttttcagctgtacaagaaaggtagttctattttccttttatatttgaaataggctcaaagtttgcccagggagcttaggttctttgacttatagagaattcatgatttgtttctaactcttctatttactgtaacttcaaagtggaaaatgaaccatataaatgtgtaatagaattatttctaatatatcaaaataagtaaaaataaaaatataaagcaatggcgattagaaggcagcttgtgtgtgagtgtgtctgtatgtagttattctttagtcctaagagccaagatagttgttttgttgacattgggcttgtgctgctgttacgtgggcctgagtyccctagaaggagaggcagaggaattttaaatcagagtgggtatgactaggctcctgactctgcaaactcatgtctagttgaggtgacaaaactacagtttaaggcaggttgtaatcacagctaatatggcactttgactgtgttatctctgtacctcacaaaaaccctgtatggtgggtgttcttatttgcatttcataggtgaggaaatcaagactcagagatgaaatcatctgtctagatcatagatagcaagtggcaaagctggaaatgggatccagtctctgatctttctcacaccagggcctgccctttttctatgtggtgttgcttctctaagtaccaataatatagttccaagttttttaagagagggagaagcaagtggggtttgaaggatcaggaaatatatagtacctgagctggtcatttaaaacgggtatgattttgatcaatagtatggcagagatggcactcagggcaggagagcaaagtcagagaaatttgcatacctcctttgggtgatgttgaggagagctcaggctgatagtttccattttgacttctttgtgctatttctgcagggaggtcctggccagtgaagccatccttaatgttcctgataagtctgactggaggcagtgtcagatcagcaaggaagacgaggagaccctggctcrccgcttccrgaaagactttgagccctatgactttactctggatgactaaaacaaagggaagaactttttatgaactccacaggaagtagtaargcttttttttttttttaattaaaagaattttttttgagacaaagtctcgctctgtcacccaagcaggattgcagtggcataactgtggctcactgtagcctcaacctcctgggctctagagttcctcccacctcrgcctcatgagtagctgggaccacaggcgcawgctaccatgcctggcaaacttttttgattttttatagagacaggagggtctccctgtgttgcccaggctggtctgtaatgcctaggctcaagggatcctctgccttggcttcttaacctgctgggattacaagcatgagacaccattcctggcctagaagcctatttttaaagaaactacaatctcccatggggactgtttccctgcctcttttgtgcagtcccatggaacttgcctacagcaagaggcctaagattgaatctttttggggaaaagtcattctaggatgaaaatcctatgttaaggccgggcgcagtggctcacgcctgtaatcccagtactttgggaagccgaggcaggtggatcacctgaggtgaggagtttgagaccagcctggccaacatggtgaaaccccgtctttactaaagctacaaaaattagctgggcgtggtgccaggcrcttgtartcccrgctrctcaggaggctgaggcrggagaattgcttgagcctgggaggtggaggttgcagtgagccaagatcgctccattgcactccagcctgggtgacagtgaaactccrtctcaaaaataaaagaataaaagtatgtctgtcatccagctcctatgtctgttatccagctccaagtacagcttgtgtatatcaacattttcaaaaacctttaaactaccaaatgaaatccagatgtttttccatggttgagaagtgtcttgtgttcatgttgcctgtgaccgttgaaatgaagtagtatgtgtaatagcaggggctagagctttaggcccagctgttactccaaaatcacacagggcagtttctccctgaacaacccaaagtggaaaagggatccaaggcttttgctatttttctcttaaagcattcatcttattcatagataagagcccatttagtccttcggatatttaactcctatgtgccaggcatttttctaagctccaggaccatagtcatgtcccaatatggtccctgttgtcccagagattacagtttaatggggaatagaagggacagatttaagaaaaaaaagataattctcctttggatattgttttaggtgcttgatatatctaatatgtgtctgttgtgctgctgggcagttctaaactcatcagtacctgggttggttacagggctttggggatcatcagggtataggccataggtgaaattaagatagggtaaatacagtcctgagctgaagatgattacctgagaaatatcagtatttaaggagtgcttgaaaatagtgatctaacatttacatagagaaggagcaaagagaatgctacatattaggcgcaaaaagaaaaatatttttacctttatattgggcacttatggtccagacactgtttcatttaatcttcacaaaatctctgtgaggtaggtattacctctattttactcatgaaaaaaaaactgagactcggaaaattgaagattgtggagcctggggtcaacaggcttaggctttttaaaaaacaggccaggtggctcatgcctgtgattgcagcactttgggaggctgaggcaggcagatgacctgagatcaggagtttgagaccagcctagccaacacggtgaaaccccgtctctactaaaaatgcaaaaaattagctgggcgtggttgcatgcgcctgtaatgccagctactcgggaggctgaggcagtagaattgcttgaaccctggaggtggaggttgcagtgagctgagatcacaccattgcactccagcctgggtgacaagagtgaaactccatctcaaacaataacaacaacaacaacaaaaaacaactcaaattactcatggccctgggaatgggggcatttaaaaagttaaccaagggaaccaacctggtttccacaaagatggccacttctgggtcagcccaatcatcagtatccctgggtcctcagcatcccttcctacctcttttgactgggaattacgagattacagccccacctacggaaattgagcacattagcactggccatgctgtacatacagcaaatgagagggcttcatactgttacaacaatctgtaccacaattctctgtgcggtctgcccagctctaaatgacatgtcctcagaggcatcatcatctccaagtccatggaaaccatgcacttacagaaaccagaacctcccataccacatgttactaatgacctacaacatcgacttcgtctgtatcatgcagtgctcaacattctggttgcagcatcacatttatcaataatttgattccatgctgattcctttacttggagtattgagatcccccaggtacagtgaaggtatgaccctcttaaatggaagaccaggagttgtttcccctatgctatggcaatccgccacccggaagcacttgctgcaccaacagcattcccaaagcttgcctctgcagccctgtagcacccattagaaacacttctcacaatgaactactgtgctggcaaacccataactggactgccggacagcaagctctgtgaggcatctaggaaaaaagctcgcgaaatcccgagaaacactcttcactccggaatagcgtcacattcttgagtcatttgggatgacaggggatatcctggagcaggtgtattgggaagtcagtgaacaagaaggctaattcattagtgggcctgctagcgtagtattttaacgatttcgcagcctttaaatcattggtggtctttagcgtgccggatcagctggtggtggagttggaggatagatggcagggatctgaagaaaggtgaagtgtagataggagtagagacaatatgaagtttagaaaagactaattgctggacgcggtggctcatgtctataatcccagcactctgggatgccaaggtgggaggactacttgagaccaggagttcgggaccagcctgggcaacgtagcaagaccatgtctctacaaaaaataaaaaattagccaagcgaggtggtgcgcgcctgcaatcccagctactcgggaggtgagaagatcgcttaattccgggaggtcgaggctgcagtgagccgtgatcgtgccattgcactccagcctgggcaacggagcgagaccccatcttaattaaaaagaaaaaaatacaggagagactgggctgctttgaaaagtggatttgacgggaatgtggggtttggagagatcttatgttttccaagactagaaaaacattgtggttccgttcagccctcccggaaaatacgtaggggacttaaagagcggaccgagtacctgtttgtttccccatcccttagccggcagggctctggcagcgccctgggagaacttagggaagggccttctcgcagcggttaccggaagtgacgcattcattctcgcgagaacaaagacgcgcgagcatcggcggcccggaaccggccttggaacaactgtggaacctgaggccgcttgccctcccgccccatggagcggcccccggggctgcggccgggcgcgggcgggccctgggagatgcgggagcggctgggcaccggcggcttcgggaacgtctgtctgtaccagcatcgggtgaggcggggcgtgagagggagcggcggtgggttggagcggcggtgggtttgagcgtctgtggaacacagggctgacagtgtgggatagatggttggtgggaccttgggcagtatttgggggccagtgggcttgtgtgtgtgtattagagagaaagatactatgcctgtgtgtccaaagttgtatttgaggtactgggcatagatagagctgttgcggggaacttgggtatgactgtcaggctgtgaccaggtgtttagtgagtgtgacagtgcgtgtgtgtctctgtgaatgtggagtgtcagggtgtgtgaggcagatgcacgtcacagtgtgtatgtaggagcacgaatgtgtgagaagagggctgaaggggactgcctttgggaatgtgtgcgtccgtgtgtgtgtgtgtgtgtgtgtgtgtgtgtgtgygcgcgcgcgcgcgcgcttggaggccatatgatatcagtggggactggagtagacaaggaaggcttcatgatgggtccagagttaagcctttggaagcatggatgggctttggaattggggatgtattccaggtcgggacagtatgagggtgagttggtgcagagcatggcttcaaacgaaaggctatattagtagatggagatggggggcgctctagtaggtggaggacagttaacatcagactcaagaattttactttgatttaatagagaatgtttaaccattgtagtagcagttaaaaaatcatatttgggtcttgtttgtttgtttttgtttttgagacggagtctcactctgtcgcccaggctggaatgcagggcgcgatctcggctcactgcagcctcctcctcccgagttcaagcgattctcctgccacagcctcctgagtagctgggattacaggcgcccgccaccgtgcctggctaatttttttgtatttttagtagagacggggtttcaccatgttggccaggctggtctcgaactcctgacctcaggcgatccacctgtctcaggctcccaaagtgcagagattataggcgtgagccacggcaccaggcctgggacatgtattttttgatataccgataaaagctgtgaaccctttccccagaaaaatgcacagatgcacattcacacaaccatgcattgccatttgagaggttcgtgccttcctaaaggacattttaggtaaatagaccctggactaataattcctgtaatataggctttgttttgttgcctgtaaagtaagtatagtataataattacatgcatcatggatttgagagttaaataaaatagtaatgtgtgtaaagctaaatacggtacctgacccatgaaagccctcaactgttagcacctgctgctactttgttgttgttgctgctatgatcataatgctcctcattaattggccttaaggaaatgtcaagataaaaagtgttgttctaggaaaatggttttgtaaaggataaatttgagtggaacaacatatgggacaagatgaacaggtaagatcttactaaaatgcctgggcttggcttgtgaatagagaagttaattcaagaggaaaagtaataatttgttatctaaaggaacatgggtgtagtgagaaagctcgtaatttggggtgggagaaaggggagataggagtctaccttgggaaaataggcatatttagggtaattagaatgacaactgaaactgttagaactgaggaagttttgtgaaccaggtttctagatagggcataggagaaaatcttggagaaagagaatggaaggtgaaggactaaggcattaagtcctgtgatagcaggataagtagtaaatttaataattctcaccatcagagggaacataacacactaaaaaaaaaaaaaagtgggagccaagtgcttccagtggcatgttgcctgtgttacctaagcctgcctatccgcctggtcataaggaaaaaggatgcatgctggcagcttttgtgacttcttttcttggtccctgggtggggatggatgaattaatcactttttgttttattatggtaaagtatacataacacaacatttatcactttatttttaagtgtacagttaggtggcattaagtacattgacgttgttgtacagccataaccctatctccagaatattccgacttttttgttgttgttgtacatctataaacttcccatagaatattctttgtgaaaaggtagaatttcacagagttgatgaaatataaattaaggagttgaaggatcttacaaagtgggatttttgaaatagataacttattgctccattaacatgagcattcagggctcagtgttgttcatggttgtgcctgattctcatttccatggtggtaaaggcctgcatgggacatagatataactggtcacctgctcataacaaaaggaagattgaagggagtgagaactgtgggtaggctagcatgcagtctatcctagtttccttcttctctatgcaccaggtatcatcttatctctagcttcttttttcctctcaccctccaattcacactaccctatccaagctatgtcttgcttccccacctataatatattttttctgtcctggcccctgggctcttctctctgtattcatacacagcctttattacaactctggtttgtgtcagagattacatatgttggaaattcttttgaactctccttgtgatatcagaaacatagtgtagcctgtttagccctgactgctatttctgagctgcattattaatgttgccagaatatgatggggtctggctatttcctgtaatatgcatcagaatgggtttaatttcagtcagaattggctaaattactagtcacaggcaagagatgttaggttcattatgtagctatggaagcagaagtacactcattggtaggattttttttcttcatgtcatttgaaatgcatacattaggattggagttttttgctttaggcttggttatattaaaactttctcttgctgtttggagtccaggaagccctgaattaccttcttcattttagttatgctagaagctggggcacatattagttgtcttgattaagctctgaaaggggtttgctgaggagacaggatctttttttttctaacatta

SEQ ID NO: 6792 - DNA, 366710 bp, Homo sapiens
  misc_feature (1)...(366710): n = A,T,C or G, or insertion/deletion polymorphism (see Tables 1-2)
aatctaaagtcttcctagacagcatattgttggatcatgtggctttttaaaaatccatcttgcttgtctctgcctttaaattggagagtttagtccatttgcatttaatgtaactgctgttaaggaaggacttacttttgttattttgctacttgttttctatgtgtgatgtatctttttttgttcctcaactactgccttctgttgtgataaaaagacattttctgtcatacccttttaagacctttttttcttttactgtatatttttgggttattttcttagtggttgccttggggattacatcttcttttgtttggttgggtttgagtttttaaatttgcattttcttgattactaatgaggttgagcaccctctttttgcttttattattatttttaattaacacataactatatatgtttatggggtacagtaactgtatatgtttatggggtacagtgtgatatttcaatacatgtatacaatgtttcatgatcaaatcagggtaattagcatattcatcacctcaaacacttaccatttctttgtgtttggaacttgggttttggaattagacagccctgggatcaaaatctgaccatcatatactggctgagtggatcagactagccactttatctctttgtgcctctgttaccacagctataaaatgagggtagtaatagtcacctgcaaggggtgttttggagattaaatgagatcaagaatttaaagtgtgtagcatgatacttgttacccatttggccctctaccaaatataggcatatggctgcctttacactggttattaaacagataactggagaagcaggtctcctgctcttaagagccactaaagtagtgggagagggaaacatgcaggcaggctcctcatcacccactgggcagacacagctccctgcctccccatactcaatgcttattctcagaatattttactctggtcaataatacaacctagttaatttttcagttctttaaaagatcaaaagcctctggtcctagggtggctactttcaaaatgtgcctctgtgacccatgccagggactgccagcctgcggacatagccatcagctctggagacagtcctatcttgttctccagtgaggagcttggcattatcctcctgcctttaaccagcctgccatggttgaaggctgacagtccctggttcaagtgacctaggaagtgcccactgttctctgctgcccagctggtcagccagcactggtcagggcagcctgggtctgactggcaatgtgagggagggctgcgtggtcacagttttgattctagctctgtgtattttagctttcttactgtctttgtcgagaaaagatttcatccttcttatggctctgtgtctccaggggctttaatccacatccacttagttatctgttgagtgaatgattgtcatctagggcatacttgcaatggtgcctcagttgaaggttggattggaagtggccatgaaaactgagtgatcacttctctccaaatgcaacaatgtgggctgcaggacaggcagtacatcaggcacccagattgtccaggtcaggcaacacctctatccctcaaagccctttgaagtaaaagggtgacctggatgctaaagaaccctggacccctcaccaagctcctggttaagaggagcccatgtccgatctccagggcaggtctggggttggcatggaagctgctgcagtgagaatgttttggggagcacatcctgaaatagcaattggcacagggggtcactgtgactcattagttctcacatttcctctcaagagaaattcaaattggtgacaaaatatgacttcctgaaattaccagtgcttgaaattactttgttcgccgtgtgaaactaaattccttaaaatcgggctgggtgagtgtattttttagttactcttcttgaatcagcctctgcagtcacacttggcttcccatgcctgcttggccactgatgagcttggcttgacccttgatgaatcagttaatctgtccatgtctctttttttctcttctttaaaatggggatacgaacaccatctggcaaggattgttgagatcatcaaaagagagggcctaggccgggcgcagtggctcatgcctgtaatcccagcacattgggaggctgaggcagtgcagatcacctgaggtcaggagtttgagactactctgaccaacatggtgaaaccctgtctctgctaaaaatacaaaaaaactagctggacgcggtgggtgtgcttgtaatcccagctactcaggaggctaaggcaggagaattgcttgaacttgggaggcagaggtgccatgagccaagattgcatcactgcactttagcctgggcaacagagcgagactctgtctccaaaagaagagagaaagagagagaaagagagagaacctgttcaggtcattttctgggaatatgtaggctttacactcctggtctcccatcccaatgttttgggccccatttaagctccatcccaatgttttgcaccccatccagcccaagtccctttccttcaatacatctgttttctcttttggaaattgcaggcattggattagataacttccatgtcatatttcaggtgtaagagaacatgattgggttaaccagaagacagctattattttgagccaactccaagaaagataagttctcatgccacgaggaaagcagcacaggttggagatcagctcagtaagagtgaagtgattccaccacattccaaccctaagggcaagttccagtcctaacaacagttatagcttctctgaaaatcatggtgatcctctagatagggaaacccaagctacagagacgagggaagagcagacggcagacctatgtaaggtggacagtgatgcctggtgaccaccttcctcctctggtgtctgttggcataaagctttttagaaagagtcactccatggaggtctgcagagtcgtgtgcagtacttagattttggggcccaagagacctgagtgtaaatccttcactgccagttcactggctccatgaacttgggccagtctcttgtcttctctgagcctctgcttcctcatatggaaaatagggacaacaatacctacctcatagtgaggtcatagaggaagtcccagatcatgagctcccttcccttgactcatcccttaacagcagggatgaatatttatgttgtttatcaaatcacatttatggaacagagactgtgtgccagggaactcttataagtatcttagctcaaacagctctcagagttagatgtgatcgtgacccccttgtctagctgaggggctggagtcccacagagagtttgggaggggtgatgatttgaattcaggtctgtaaggtgctctaggacttccaccctaatcatgcataaggctgccccattatgctgcgttgcagttcatgaccagctttaaaaacatgtgcttgatatttgcaatacactcaagtgaagagccatgccttccagtgccgttattttgcattttcaccctgaaacacttttcttctgtttaaggatgtctgattctagcaggagctagaccagaccgtgctcacattgcccctttttgcaaaggaagggcctccctgcaacgtgtacacacacacacacacacacacacacacacacacacacacacacacctgctttgctgggctttccttctgggtcaggtcaaactcagaggagggaagatctgaatgtgcctcagcttccatgcttccagggatgatctctgctccacacatatccaaacccagccatcccaggaccctagcaaaggagtgtgtttatatgtgcacaggacttagccctatgacaccattgtcacctagaacagaaagtgcttccccaaatgctcagctcaccaccagcatatctagtcccaagagagacctgggcaaatcaacatccagttctcaaaagcagccatgtcccttctttggtagactgactgtaaaagtctccatgagagacatgtggtcccatcaaccccatttttggcccagcagcgtggatactagcatactatttgaagccttgatattatgctggtttcttacactaaccctatcccacccctaaatcagagccaattataagagagactcacccagggggctttcttgattttgtctttttcttgtcctgattccagaccaggagcccggcatggaaactggagaggtgttgtcaagaaacatgctgagtgtgaattgtgaattctgatgtccccagggtcttaatcttggggacctcatcaggaccaaggacatctacccctcagtgtctttgtgaaaacttgtgaaaaacagatggagcttctagatggtgctgaaatccagtaagctgttaatggtggctgctaggaggtgctacattgatatttgttaagcatttgccttcagaattgaagctctggccactgttccagacccatggcacattcggaacttcctgaatatcctggcagatattcaaccctttccctccatgtgcatttgctaataacaaactctgcatgaagcccaatatccagccctgtggaatgtgccctcgcaggagacagagccgcctgtccccaggacactcatgtggagggtgtggtacgatgggaactagatatttgatatttgtaccaggcatgagctcctaaaaccctgggaatttcctgagtaacagaagtgaggggagcatttttggttattcagagaaagcccctttcaaaggcacctgaggcaaggttaaggaggtgactgtgggagagtgggaactggctgggcatgggggtgaaccagccatgtgattagagggttacaagtttcagccctatccttgacctccaggaaggagagaggaactggagattgagtccaatcaccaatgaccaatgatttgattaatcatgcccacgtaacgaagcctccataaaaacccctaaatgatggggttcagggagcttccgggttggtgaacacatggaggttctgggagcgggttgtgcatgaagagtgcatggaagctccatgcccctccctcttccctggccctacgcatttcctgcagcaggctgtcctgagttgtgttctttgtcattaacctgcaaatgtcagtagtgttttcctgagttttgtgagtcattctagtgaattatcaaacctgaggaggggttgcaggaatctattaatgcatagccaagtaggacggagtgtggatggcctgggcacccattttcatctgaagtcggggaggtcttgtgggacggagccctaaccagtgtggtctgcactagctctggagagctaatgtcagaattgaaatgaattgaattgaattgaactgttggacacccagctggtattggagaatcagagagggcaagacaggtgtccaaggatgtctgtactcactctaggttcaaggcatggtgggcagggcctgtcccattcccatctgggctagcagccaggacagggtttgggagagagccggcgctccacactgagtggggacacagggctgcacagggcaggccactgggaagcttggctcatgcccacagcatcttgctcttctggtcaagttttagtttcgaatttcagtctcctctgatattccaagggctttatgaaagatcccaactgataatgtgaggcatgcattctcagggcccctggatgagggtcactttgggcccggcctctggtgtggctggctgaggtgtgtgggcacttcattcaggccaccaggtgctctattggacaagctatggggtctggtgtgaggctggcttagcccagaggaaggggcatctttgtgatttgtagaaaggtactatctatactttggttccttaccctgcacaagagttgcttgaagtatcagtcccaagtaaaacgtattaacacagtgctctgagactcaaagaaaggagggcaatggccacagctggcatcacagggacagacatctggcctccttctcttccttgcagtgggtgagtgagtctatcttgggagtcctcagggtgtctgactggccaccctctgttcaggatggccctgccttccagttctgcactcacgcagtctcagaaccagccctgatgtggccaggagcatgctgtgcctggtggcaggtctaccattagtgcagatgttacagtccttgttttagcagttaacatttgctgagcatctaccaggcacctaccacacaccaggccccagtatcttgattcacacatatggccacccaaagatgtcttgataattcttattttaagagaaaagtgaggctcagagccagtgtgtgcaaggtcactggctagcagatggctaagtctgctgggttgagtaacaccaggtggctcctgtctgtttccatagcaaggatgtgggcacagatgtccaccatatgctgcttgtatgatggagttgactgcctgttctgttggctctaccctaccaccttgaggctccaaaccactccataggtccagaaatctgctttcaaggcatttgattccgcctggtgactcctgttagcaaatttaaagcatatgaactttttgcaagttatcgagtcatggccttgacaatatagtcaaagtatattaaaccaataggatttcatcacaaaatggacctaaacaccttcccattccccaggtggccccttggagtcatcatctttggtgcacataggacatggggccacagtgacatatcttgcagtaagaggagcaaagcttgccttcccatccatcaacctggggagtctgagctgagagaggccaccaccctcaaggtgcagtggtggccactgctgtgactaagggaagaacacagtgcacaaccctgaccaatgtgtctgctccttggagtttatcttgcagggaaaggtgcattcacagcattatgtgtaacagtaaaaatctagagacacctggaatgggctctgttgtgcttcccagatggcccaggactagctcccagctgctaacacccagccctttcagcctttgcctccactgggaatttctcagagacacactaccttcctaggggcagccaccaccaatggctggtcattatgggggcatagaggcctggtcttcttgccccaacttaggacagcctggaaagcccagctaaccctcagagctaagtatggagtctactgaggctgctgttgtgcctgcattgcagtctgattttgccttttgctcagtcctgcttcctgccctctccatgggtgtcaatcccaaggttttctagattttttcctgttttcttctagaaacttcatattttgtatttttgtatttaggtctaccatccattttgagttgatttttgtaaaaagtgtaaggcctatcctttctccattgaattaccttggctctcatcaaaggtcagttagctacatttgtgtgggtctatttctatttctctatttgattccattcatccacgtgtctatcattttgctcatatcaccatgttttgtttacatgtttattttagagtaagtcttgaatttaggttgcatgcttccttcatttctgtgttggttattctagatgttttgcctttccatataaattttagaatcagtgtgccaatacctataaaatagcttgctaggattttgattgagaattcactgaatctatatagatcaatttgggaacaattgacatttaaataatatggagtcttccaatccgcaaacacagaacagctctccatttatttcaatctctgatttttttccatcaatgttttgtggttttctgcaatagatcctatgcctgttttgttaattttataactaaatatttcattcttttggtgctattttaaatgacagatttgaaaaaaattaatttcaactttcaattgttcattgctggtgtatggaaaagcaaaaaatagcttgctaggagtttgattgggattgtactgagtctatataccaagttagaaagaagtgacttttttttcttttttcagacggagtcttgctctgtcaccaggctggagtgcagtggcgctatctcagctcactgcaacctccacctccctggttcaagtgattctcctgcctcagcctcctgactagctgggactacaggcccccgccacctcgctcggctaatttttgtatttttaatagagatggggtttcaccatgttggccgggatgttctcgatctcttgacttggtgatccacccacctcagcctcccaaagcgctgggattacaggaatgagccaccacgcccagcccagaaatgacatcttaacaatattgagtcttctaatccatgacagcggaacatctctccatttatttcgattttcttagatttcattaatcaagagttttatacttttctgcataaagattatgtacatattctgttagatttataggtatttcatttttatgctaatgtaaatggtatcgtgcttttattttcaaattccagctgttcattgttgatataaaaaaggcattgacttttggatattaaccttatatcctgtgacttgctataatcacttataagttgcaagagttttttccatcaattttatggaattttctgcatagacaatcctgtcttctgtgaaaaaaggcaattttatttcttcctccattctgtatatatatggcttccttctcttgtcttactgcatttgctaggacttccagtacaatgttgaataagtgtggtgaattgccttgttcccaacatagtgggagaacatctagtttctcacaattaagtatacattttgctgtagggtttttgtggatgtcctttatcaagttgaggaagttacctctaattctagtttgctaaaagtttttatcatgaatgagtgttggattttgtcaaatgttttttctgcattaattcatatgatcatatgatttttcttctttagcctgttgatgtggtgggttaccacattgtttatcacatattaactaccacataatagttttttgagtgttcaatcagccttccatatctggaataaactccacttggttgtggtatataattctttttatacattattggattcaatttgctaatatttcattaaggacttgtttacatctatattcataaaagatactgatgtgtagcttttctttcttgtctttatctggtttgggtattagggtgctgttagcctcacagaatgagttagaaactgttacctccatttttatattctggaagatactgtagagaatttatctaatttcttccttaagtgtttggtagaatacaccagtgaaaccatttgagaactagtgcttactttgttggaaaattgtcatttatttaacttctttaatagttataagccaattaaaatgatatatttctccttgggatatcaattatacttcttaaaaatattttcttgttgcagtagattttgcaatatatatttacagctaatctgagtccactctcaaataacactactacttaaaaaatagtacaggttccttatatcagtattcccagttcctccatcctgttccttataatattactgacattcactttggttatctacgtgttataatcaccctacatattgttgctattgttacttggacaaacagttacctgttagatccattaagcatgagaaaaatgaagactttgttttactttcatttattccttctctgatgctctttctttatgtagatctgagtttctcacccatcattttctttctctcttttaacatttcttgtaggacaagcaatgaatactcttggtttttgtttgtctgggaaagtctttatttagtctcacttttttttacaatgaaaattatttttctatttcaatacttttggggtacaggtggttttggttacatggatgaattctatagtggggaattctgagatttcagtgcacctgtcactcgagcagtgtacactgtacccaatatgtagtctttggtccctcaacctcctcccaaccttccccacgagtcctcaaagtccattatataattcttacgcctttgcatcctcataacttagctcccacttacaagtgagaacatatgatatttgcttttccattcctgagttacttcacttagaataatggcctccagctccatccaagttgctgcaaaagacattatttcattcctttctattagccttcacttttgaagaaaaattccagtagttatgcaatcctatgttggtagggagttttattgcagcagttttaatgtacaaactattcaacatatttttttttcaacagttgaaatatttcccttcactctccacttgcttgcatgacttctgttgtgaagtctgatataattcctatccttgttcttctaaaggaaaggtgatccccatacccctggcttctttcaagattttctctgtcttttgttttctgcattttgaatgtgagacacctaagatgtgtatattttttgtttttatcctgcttaggtctgtggtttgttttctgtcactgcctggagttggccaactccaagtttagagtgcacacaggtcttcacaagaccagcctcacttccaacaccaactgcaaattggggggtgttcccaaaaccacccaggctaggagctgtgccgtctttaatatttgctgtgtctgcagatgccagagcgaaatcattgattttaagtttgcacagattttaccttgttgtaaggatgagagtgaaaatgtctaagcttttcacatgtcaaagatgaaaccagaagccagagtctttccattttcatcactactgcacaacgctgactattcttttccttcatctacccctggaagatcctgagtcacctgccagaggacatcacctgccacacggaggacatcagtggacagttccctcaggcctttccattggatgatatgagaagagcatgagctccagaaggtaagagtttttgccaattatgttgcctgctgtattccagtgcctagagcagtgcctggcacaactcatgtttgctgggtgactgaataaattatcaacccttaggaaacttttgagatcatttcccaggcctgtccacctttaatggccccagtcagctctcatttctgcagacaatctaccttcctctgagactcccaggtctgaggtttgcagtgactgcatgctggagaagtaaaactgggagaaagctccaaatgtagggttcctgtgtccagagtctccatcatatcacttggttttcaaaaaattcccaaaggaaacaattctcagccagagattaacagtggcatctgattgtttgtctggaagggagttcccacttattcagggtttaccctgtgcctttccttgaactcttttcttttaattagacatgtaatccttattacagtcttgtgagatatggcctattgtggtctcacttttacaatgaggaaatgaagcagagagattatatcacttgagtaagggcatagagtaagcaggtggtagaacctggatccacacccaggcctggctttctctagactgtttttacattttgtgggaaaatgatgccagcagcagggagggagggctggctttccctgtggactttccacaagaaaatccctgttgacatccatctgcagaaggagatgggcaggttaatagagacaggatcattccacggggctaagaggaggagggagcagagggctgggcatgggaggagggagagcctttcctaactgaatgctgggccaagctggctgcgggatgccctgactcctggaaatctctggggcaggtgtctgagagttgacaccatgggcatctatgccctatgttctccctcaccttcttcctggccaccaggatgctgcttcctcccacgcttgtttctatgataactggcaggaagtgttatctgctagccagctcacctgttgagagaagccagtttgcactagtagctcagtagtatcatgggtagctgaatgggtactttcagatttgggtggcggatttgatgggagcagccaaaaggtgccatcaatgtccctaaaagcagaggtactgctgtgagtgagcactaaagatgggtcagctcagatctgggttgagtcctgtctgccactaactagctgtgagcttttggcaagtcagtaaacttcagatcttctgcttcctcatctagccaacagggaaaagtgctctgcccccacagagctgggccataggagaggataagctgctgggtgcagagggcggtgagcctgcactgtggtttgcccatttcacaaccattcccagagtcaaatcatttctcccagatgtgcagaaacagaaaccattgtaggaaactgggtctctaagaagagccgctgactcagcccttatttggttctgtggctgggggtgggtgagcctgggcttccgcttggctccctagagggtagtgtggctggcagggcatctgtytagacactctctgaggctctgcccagcctgttctttggaatagactctcctctgcttctcagggctgacagctctgagcccaggaaagcaagagggctgaattgtgtcccccgactccagttcatgatgaagcctaacccccaccgccccatacagaaagtggctgtatttggagatagggcctttaaatatcaaagttaaaatgagtgattaagttaaaatgaggtcattagggtgggccctagtccaatatgactagagttcttataagcagaggagataaggacacagataccaactgtgtgaagacacaggaagaaggtgatatttacaagccaaggagagaggagaaagaagcttgctaacacattgatcttagacttccagcctccagaatgggaaaaaatacatgtatgttgtgaaagccctggggcccgaggtgctttgtcatggcagcccgagcagactcatgtacctgccctccctcttcctcagtgtgaacaagggaattccagcacccatgggaggctcttggaggctaggctccttctgggtccaccgtgaatgaagcacttcaccttgtttctgggcctctgtctcttgttgcccccacccccacttctgcactgggcctggtgtttccctggaccccgactccctgtctcctcaggcatgactagtttcatactcctccaaggttggtaagagaaaaatgcctggggtttaggttatagcttgaagcacagctttgggtgctccgtaacttgtcccagccccttggccagctccaagttcagccacagctgtggtgaaacgtcccctcttaggtgagcccactgatggcttcccgctccaggctctcagccctcggctttctctgaagccacagggaccctaagccctgggcaaacaaatgcagtccagaagggctgggtgtccacacccctggggttgccctcagccaagggagaaagggggccgggtaacccccaccctctccccttccaggcttatggcaggtgagtctgcactcttcccagagtccctgtggaagtgagtcttgggacagcagcaaccttcattatgcccctcacactggccttccctccttcctggtgtcactctttgccccatcagtcctgcttcctggcatcacctcccaaataaaccacctgcacccaagcccttgtcttaggctctgctattggacaacataaacttagactacttcctggctggggaagcaggatggaaggactgcacttttgagcttcagttttctcctctgtaaaatgggaacattaatatcttgcaagctggctacaggaattaaatgacatcacccctgtggatattgaagagagttgtaaaccgtgcaaggtgatctcaatgttgttatttattattatttttagtttggtggtagcatcaggtccttactctctctctcttttcattaaagaaagaagaaggaaaatctccatcttcagactcatttcccaggggtcctgtgctgccaggtgcaggtgaacatcctggagaggcttgggggttaaggggttaatgacatggctgctccttcttcctctgccctgcacagcttcagcatttctctggtggctgtcgataaaggcatgttagctgtggggacactgcatgaaggagacattcagggtgtctgggtctttccagcccagccctgcatccatgctgtctgtgtgcctgtgtcccatgcttggtgcttgtgcagggagactggggtgagcaggatggaggccttagagcttgtggtatggccctggtcctcttccaggaatgtctgcttgagtctgcccactgggctgctcctgcccaggctccaagagccaacagggattctccctgctctgagaccctgccctgaatccatgggttgcatcggggtcctcctgtttcttgctgctccttgtaccacctgcaccacagccctgcccttttgcagaccacgatctcctagagaggaggggatatatctttacacgtgttatgtgtgtccaagctttagagccatgactgctggcaaacagtaccagctcaagacccatggctatagtcatcgctagtaggacagtgggagaccagtgaggagttctcacctgaggtcaccacaaagaggccacgaagtgggcaggcaaagcccagaccttgagtggcatgcaaaacccagagtgctgggagggaagtcagaagggacaggacaaagggttcaggaagcagagccactcatagaatcaggatatgaaagtaaaaggtaacaagttggaatagtacattggggtgggcagaagacatatcagggagggccggagtctgagaggctttctcatgatggccaggactttagcttcattctgagagctccagcgtgaagggccagaatgggtggttaggacaatcagaaaagctgcctgcatacacattgctgccatccctgccaggccagtctctgagaagctgatctccccagaagccaaccaggcctctagatgaatgccactgagagtttactgccctgggcatccatatttctgaagctgcagatggagacaggctccaactattgtgtcgaggtggggggcaaggggtagaaaggagccatgaattattgcttgtgtgaggccacacaataggtgtcattcatcactcacagagctgttgtccagagatggccgacaggggacacaggtatacagatggatggatggatggtgaatgaatgagtggcagatgagtagccaatggatgaatggtgaatgagtgggtggatgggtgggtggatggacgggtgggtgaatgggtggatttgtaggtagatggatagatggtagatgggtgggtagatggatggatggtaaagaaatgagtggatgaatgactggtggatgtataaatggatggatggatgggtaaatggatggatggatgggtagatggatggataaatggtggatgggtgggtgaatggatggatggcaaatgggtgaatagatggatggatagatggatagatggatggtggatgagtggatgggtggatggatgaattgtggatgaatgggtgaatggatggtgtgggatcagtgagacgggatgaaaagaaggcagaacctgctggaagggtcagtaagaaaaggcacaaagtatcctcacttcacctaccccttcacctacattcccctcccaacaaggatgtctccatcctcctcgctgctaaagccagtaggctggcatcaacttaccttctttctcccccttttccacatgctgccagccacttgtgcattccatcttcttagactcttatgtttctaccaccactttttggcctatattctcataagctctcccttggactgcttaagtagtctcctgcctagtagctctccctgctctggtctcttctccctctgcccatccactacccctcctagagccattcccttagaatcttagaatggcttccaatcttccaccgttttcccctaacagaaactacagaatgaggtctggtagctgcttcgtaatgcaacttggctaggctgagttacacttcccaggattcccttttgtgtatctttcctataagtctgtgccacggggagattcttggggggatttgggagacatacattgctgctgatcagtggaatcacctcatcagtgtgaagcagcagctgggcctgccattgttccaccttcccatgaagccttgggcagcttcttcaactcgcgggccaggagtgtgtgtgttgtgtgtgtgtgtgtatgtttagcttaatgatgaagggccctggcttctgcaggattaccttgtaccactaaaactaatcatctcattacccagctagaaaccccagacacctgagtgcctcccctgcccagtactgtcaagtgttgtccatttttcttcccagtatctcttgaacctcattttccctctacattcttacttactcaagccctcaggaaggtcacctgaccaccattagtcccatctccatgctatttattcattcattcaacaaacaagtattaaacatatattatgtgccaggcataattctaggcaccgtgcaaagagctctatctttaaacttccccttcccctcctaattctagtggtgcttaatgaacaaagggataatggcaataatgcctgcaagatcgtgcctatatcctaataagaaagcggatatgggaaacttgaaaaaaagaagtaaaaggcaggacttccagctatggctaaatgatgaagtcagcaaattctctcccaaaaacacaatcataaatcttgaaaaaactgacataaacaaccatttctgtactctggaaattgaccaaagacatgcaacaatcagaaaagtagttatgcttgaaaaacttctaaactttgagtaagaacagaatgagtctgctttgcactgttgtactgtttgttagggcaattcccatcccacttctctaagctcagtcctcacacaggttctgtcagggtggggcattgtcatggggagcagcaattttgcgcatgcagtccaaagttgcttattcaattatgattgtcagtactactgacaatactggcagctagtgaatggggaggaccaatgctcaattagtctgaggttgcagtcaaggttggggcaaatatattcctggcttggactgtatgcatgtgcagtggagaccaaagatagctcaaagtatccacacattcttgccaactctaagactgagggcatgtgcagaggttatatgaaaggtccaacagaaagtaaaagccaaggcagtcttgaaaacaacctgaactttgagagtatttccctacccatgcacagatctatgggcagagaatagagggcttacgggctcatggtttgtatatgacatctgtctcatcactggctgattactaaattacacagaaacaagagtgacccctaggaaggcaggtttaaaggtacgagcaagagtaaaggcaaatataacagatattagtggctatgttctgtgagggagacagatttcacagatttaggctaggcaagttattaaacaaatgaacaatttaacaacaacattaatcatgtgagaaaatcagaattcagcgttcttaaaatatgttatctaaaatgcccactttctaacaaccaaaaaacaaaagggaagtacaaaggaaaagtgtgactcatatgtaaaaaaaaaagtcaattgaaactgtctctttgagtattgccagattttggatttaacagagactttcaaaatagctattgtaaatatgtttacaaaaacttaaagaaacatgattgaagaattacagggacataggacaataataaatcaataaatagagaatttcaatgagatagaaaatatttaaaaccaaatggaaatgcttgagttgaacattcaataactaaaataaaaatttgctggaggagctcagcagaagatttgaggaaggagaataaagaacaggtgaatgtaaagacagagttatcgaaattagcgaacctgaagaacacaaaacaattttaaaaattgaagcacaaagaaaagactttcagagacctgtaaagcaacataaagcatgccaacatatgtgtaatgcaagtcccagacaggaggagacaaaaaagaaaaagacaggaaaactatttgaaaaagataattactgacaacttcctaaatttgatgaaaaacattatttttcatgtataattatctcaaagaatcccaagtaggataaatacaaagagatctatacctcagcacattagagacaaactcttgaaagtcaaagagaaaatcttgaagtagcaaaagaaaaatgtcttgtcacatgaaagggagtactgatgcaattaacagttgccttgtcatctgaaacagtgagggctagaagtgggaggacgtattcaaagtgttgaaagaaaaatacaaactgttaattaagaattctatatcaaaaaatatatccttcaaaatgaaggcaaaataaagatatttccagaaaaacaaagactgatagaattccttgctagctgatctatgttataagacattaaaggaaattttttaagctgaaaggaatttcactatgcagtaacttgaatctgtaggaataaatgaaaaacacaggaaatggtaaacatgtgggttaatatgaaggtcccataaatttatttttcctcttaacatcttttaaagacatagtatgtataaagctatagttataacagtgtatttttgggcttatcatgtataaataaggattataaatgttatatatgataagcccaaaacaatagtagcacaaaggaaaatggataaaatgaagctgtcttggagcaaaagtttgtgcattttactggaattattaatctgaagtagattaaggtaaaatgcatattgtaatctctagagcaaacactaagacaacacaaaaaatacagtaaaaaatagaaaaattaaaatggtatactagaaaatatctatctaacacaaaagagggtaaaagaaaaacaggaacaaaaaagagaagacatacataaaacaaattataaaatggcaaatgtaaattcaaacatatcaataattatattaaatgtgaatggtctaaatacctcaatcaaaatacaaagactctccataaaatagcaagatccattagtatgctgtctaaaagagacacattacagattcaaagacacaaactggttaaaagaaaaagaatggaaaaatatatgccacacgcttcatccctgggatgcaaggctggttcaacatacgcaaatcaataaatgtaatccagcatataaacagaaccaaagacaaaaaccacatgatatctcaatagacgcagaaaaggcctttgacaaaattcaacagcccttcatactaaaaactctcaataaattaagtattgatgggacgtatctcaaaataataagagctatttatgacaaacccacagccaatatcatactgaatgggcaaaaactggaagcattccctttgaaaactggcacaagacagggatgccctctctcaccactcctattcaacatagtgttggaagttctggtcagggcaatcaggcaggagaaagaaataaaaggtattcaattaggaaatgaggaagtcaaattgtccctgtttgcagatgacatgattgtatatttagaaaaccccattctctcagcccaaaatctccttaagcaacctcagcaaagtctcaggatacaaaatcaatgtgcaaaaatcacaagcattcctatacaccaataatagacaaacagagagccaaatcttgagtgaactcccattcacaattccttcaaagagaataaaatacctaggaatccagcttacaagggatgtgaaggtcctcttcaaggagtactacaaatcactgctcaacgaaataaaagagaacacaaacaaatggaagaacattccatactcatggataggaagaatcaatatcatgaaaatggccatactgcccaaggtaatttatagattcaatgccatccccatcaagctaccaatgactttcttcacagaactggaaaaaactactttaaagttcatatggaaacaaaaaagagcccgcattgccaagacaatcctaagcaaaaagaacaaagctggaggcatcacgctacctgacttcaaactatactacaaggctacagtaaccaaaacagcatggtactggtaccgaaacagagatatagaccaatggaacagaacagagccctcagaaataacaccacacatctacaaccatctgatctttgacaaacctgagaaaaacaagcaatggggaaaggattccctatttaataaatggtgctgggaaaactggctagccatatgtagaaagctgaaactggatcccttccttacaccttatataaaaattaattcaagatgggttaaagacttaaatgttagacctaaaaccataaaaaccctagaagaaaacctaggcaataccattcaggacataggcatgggcaaggacttcatgtctaaaacaccaaaagcaatggcaacaaaagccaaaattgacaaatgggatctaattaaactaaagagctcctgcacagcaaaagaaactaccgtcagaatgaacaggcaacctacagaatgggagaaaatttttacaatctactcatctgacaaagggctaatatccagaatctacaaagaactcaaacaaacttacaagaaaaaaacaaacaactccatcaaaaagtgggcaaaggatatgaacagacttttctcaaaagaagacatttatgcagccaacagacacatgaaaaaatgcttatcatcactggccatcagagaaatgcaaatcaaaaccacaatgagataccatctcacaccagttagaatggcaatcattaaaaagtcaagaaacaacaggtgctggagaggatgtggagaaataggaacacttttacactgttggtgggactgtaaactagttcgaccattgtggaagacagtgtggcaattcctcaaggatctacaactagaaatatcatttgacccagccatcccattactgggtatatacccaaaggattataaatcatgctgttataaagacacatgcacacgccgcaataaacacgcatgtttattgcggcactattcacaatagcaaagacttggaaccaacccaaatgctcatcaatgatagactggattaagaaaatgtggcatgtataaaccatggaatactatgcagccataaaaaaggatgagttcatgtcctttgtagggacatggatgaaactggaaaccatcattctcagcaaactattgcaagcacaaaaaaccaaacatcgcatgttctcactcataggtcggaattgaacaatgagaacatttggacacacgaaggggaacatcacacaccagggcctgtcatgggttggtgggaggggggagggagagcattaggagatatacctaatgtaaatgacgagttaatgggtgcagcacaccaacatggcacatgtatacatatgtaacaaacctgcatgttatgcacatgtacctagaacttaaagtataattaaaaaaaaaaaaatatatatatatatatatgccacacaacagtaaacataagacagctggaactggtcatgttaatatatgataaaatagacattaagaaaagaaacattctgggccaggcgtggtggctcacgcctgtaatcccagcacttggggaggccaaggcaggcaaatcacctgaggtggggagtttgagaccagcctaaacgacatggagaaactccatctctactaaaaatacaaaattagctgggcgtggtggcacatgcctgtaatcccagctacgtgggaggctgaggcaggagaatcgcttgaacctgggaggcagaggttgcggtgagccgagatcgtgccattgcactccagcctgggcaacaatagcaaaactctatctcaaaaaaagaaagaaagaaagaaaaagaaacattctgaaaaagaggaatatttaacaatgaaaaacagtaatggtattaggaagctgtaacaattataaatgtatggagataacatgagagccccaaaatgcatgaagcaaaaacagacggtattgaagaagaaacagaggactaattaattagagttggagatttccatatcccaatctccataattgatagaacaactagacagaatatcagcaactatatagaagtcttgaacaacagtatcaactaatttgacccaatcaacatacatagggcactcctaacaatgactgcagaatatacattattttcaagtacatttagaatattctctaggagagacctatggtaggccataaaacaagtcctgatcaattaaaaaatctaaatcatataaagtacattatctatcttggaattaaattagaaataacaacagaaagcgattttggaaaccctcaaatatttggaagttgaacaacacactactaaatcagccacacatcacacaggaaatcagaagggaagttggaacatattttgaatggaatgaaaatgaaaaataatatgccaatatttatggtatacagcaaaatcactatagggaaatctatagctttaaatgcgtatatcagaatataagggctcaaatcaataagctaagctttcatgttaagaaactagaaaaattagaaactaaatctaaatcaagcagaaaaagaaagaataaagagaaataaaataaagaaataaaaaaatcaatgaactagaaaacagtaaaacattagagaaaatccatgaaacaaaaagctagcttgttgaaaagattaataaaatggaaaagcctttatctggactgacaaagaataaaaaatcagtaatgaaaaaggggacataatatcaactcaactgaaattaaaaagacttatcaaagaatactatgaacaaccttacgccaacaaagacagaaataatcatacatatacatgcacgtgcccccacctcccgccacagacgtataaataggtataacaccaatacttcacaacatttttcagaaaatgagagaacacttcccaactcattctatgaggccagtattaccttgatattaaagctagatgaagaccttctacaaaaagaaaactaccaggctaatatccctcattaacatacataaaaatgctcaacaaaatattagcaaagtaaattcagcaagatataaaaaggattatacaccatgaatcaatgggatttatcccaggaatgtaacattagtttgacacctgaaaaaatcaattaatgttgtacatctattacacatctatatattttattaatagaaatagaataaaggacaaaacccatataatcatctaatggatgcagaaaagcatctgacaaaatccaatagccattcatgattttaaaaaacaacaactctcaacaaactaggagtagaagggaaattaatgtgttaaagggtatctatgacaaacccagagaccaatatcatatgtaaccatgaaaatactgaatgctttccccttaaaataaggacaaaggcagaggtagccactttctccacttctagtcaacaatatactgtattattctatccagtacaatagacagtgagagacaaagggaaaaaagagggtcgggagagggaaggaggggaagagaggcagagaaaaatttaaagccagattggaaaggaagaagaaaatctgtctttatttgcagatgatatgatactgtgtttggaaaattatcacaagaactaatttaaaaatctgctagaactaataagtttttcaaagttgcagaatacaagatggacatagcaaaaatcaattgtatacctacacatcagcaacaaaaactccataaatgaaattaagaaaacaacaccattcacaataatatcaaaaagaataaactatttagaaataaatttaacaatgatgtgaagacatgcagaaaacacttctgagagaagattaagaagatataaataattagaagtacatttctttctcatgaagttaaagaatcaatattgtcaggatggcaattatcttccaatgaatctacaaattcaatgtgattcctatcaaaatctcagaaacattttatggggtggagaaattggcatgctaatttgaaattttatataaaaacacaaagggcctagaataggcaaaataattttgtaaaagaataaagttacacactacctatttttacattttctccaaagttatagtaatcaagatagtatggtataggcacaaggataggtctacaggtcaatagaatataattgagaatccagaagtaaaccccaatatttgtggctagctgatagttcacaaaggagcttgggcaattcagtggggaaaggaaaattttttaacaaatggtgttgggacaattggctatccataagcgaaacagcagcagcaacaacaacaacaacaacaaaaacccttcaaacaaacaagcaacaaaacaaccctttgactgtacctcatactatatacaaaaattaactcaaaattggtcttagctctaaatgtagatgctaaaaccatacaacttctagaaacaaacacaggagaaagtgtttgtgatgttgggttaggtggactcttagataccatatcaaaagcatgattcataaaagaaaagatagaaaaactgaacttcgacaaaattaagattttttgcactttaaaatttaagtacaccattaagaaaattaaaagtcaagccacagactaggagaaaatttaggcaaattatatatctgataatagatttgtatctagaacatgtaaacattcttaccactctaataagacagacaacctgatttaaaaatgggcaaaaaatttaaataggcatgttaccaaagaagacatacaaacaggctgggcttggtggtttacacttgtaatcccaacactttcgcaggctgagaggggtggatcacctaaagtcaggagtttgagaccagcctggccaacatggtgaaaccctgtctctactaaaaagacaataactagctgtgcgtggtggtgggtgcctgtaatcccagctactcaggaggctgaggcaggagaatcgcttgaaccgggaggcagaggttgcaatgagccgagatcacgccattgcactccagtctgggcgacaagagcaaaactcagtatcaaaaaatataaaaatggaaataaaaaggcatatgaatagttaataagcacaggaaagtacattcaacatcattaatggttaagcaaatgcaaatcaaatccccaataaaataccactttacacccgctaggatagctataataaaacaatagcaagtgttggtgaggatgtggaaacattgggacccttatgtatgaggtgggattgtatgacggtgggaatgtaaaatggtacagagatttcagaaaacattttgacagtttcttaaaaattaaaaaataaacctaccatacgacccagcaagagaaatgaaagccgtgtgttcacagaagcatatgcatgtgaatgctcataacagcatcattcgtaataatcccaatccaaaaacaacccaaaagtccatcaacgggtgagcggagaaacacaatgtgcatccctacaagggagtattactcagctacaaaggagcacactgatcactgattcacacgagaacatgaatgaccctcaaaacgttatgctacatgaaagaagcccaatgcaaaacactacacagtttatgcttccgtttatagaaaatgtccagaaaaggcacatttatgaagacaaaaagcagatcaatggtttccttaggttggggttgggaggaagggttagttgcagatgggcttgagggaattttttgaggtgccggaaatgccctaaaactggattgtgatgatggttttacaactccatgaatgtagttaaaataatttagctgtgaacctcgaatgggtgaattttattgcatgtaacttacatatcaataaggctgttgaaatacatagaatatgataataaccaatgccatgaagaaaaaaagatgggaaaggagtatgggaaggcagggcagggtttcaattactgcagtcattaaaatctccaggcccccaggatgtggtgggactgcacttcctgggccccttgcagttgattggggcagtgattagtgtgggacagagttgtgagcagagtgtgatgtgtgtcccttcccggctgaggatttaactgctgacgtgagaccattcacaagctcactgtttctcgggcctctggtctggcagcatcagcctgggtctttaagtcactatgattaacagggcaggatccacccctcaactcacccaggtgacccggtggttgtgtaactcatcccattcagactcacacaggtggtcagagaaagccttaataaaagctttgggtaaaagtctgaaagaggtgagtctgtaggccaggcagctgtcctggggggaaaatggtccggagagtgggcagatcatgcaaacatcagagcagcagggaggccggcactgctggtgcagagcaggcgcagcggggtgggggagcgtggggtgcttggcagcagatcctacgatgggcaaggcgggtgccagaggagggcaggcagccgacagaggtaagtggcctgggcatccatatggatgtgttgagcaacatggatgcccatggatgtgacagtgctgattggatttaggttgaaagagtcttgctctgtgcagtatggagagatggaagggccaagggtgggaagaagaagagcaatggggaggatcctttgcaaagatccaggtgagagccgacctctcgccccgctgccatgcaattattcctatgaacattctcatcagatcagtcctgtgcttataaccatcaatagctccctatgcctcacgagaacaagtccaagtttctcaatatggcatccacctaccattcctcccttattaccccattccaactgcttcagcgcccctctctctaagtcccctattctctcaggacacagtcatgcccccctacctgggttctcacaatccccttacatctctgccagcagtgggggagagagtctgctctgggaaaggccaaggtgaggacaaccacagagtcagggaggcgtgggagagggtttcgaaggagcctccctaccccaggctgctcccagccttggtcccagcgtgcaggtcagggatttggggacttgaaggagtggttggattcagagatgccttctccttctctttggacactctggctgggtatgggcagaggccaccgtctttctctccactgtgatcccgaggcacagtggcttcttggcatggggagtgccaggagggtcagacagggagaagccagcagtcttgggagacaaccaggcagaccagtggtctgaagtttgggagctggtgagaaaagaggctgcagctagtcctgctggcaggagagttccctaggaggagctgaggcccacagtgatggagctgagggtgctgcccactgctgggtgagacttttagcacagaactcaccaagtgagaggccaagaggctcaccaccagctcctgctggagggaaagtgctggtaggttctcgatgtggcaagattgtggacaaagtgaagaaatgaagcatagcagtacaattgaacgcataaggacctttcatttgccctcaatccttgaaaatgacagttaaaagcaaacttaagtttctcaataatctccattagctgagaaagacggagggagggagggagggagagagagagaaagagagagagagagggagagagagagagagaccaggaggtggcaggtggagagaagaaagataaacacacagaggtgctaaccgagagaccaaggatggggagggagaagccccctccccctgtgctggagactcttttttttttttttttttttttctgcagcctttcacgaaatggcattgccagtccatttttagagttgtcaaagtgtttgagattaggtaatcatttacaaattaatccagtctcaaaaggaatgaatgtggatgaaacttggaaaaattatgctaagtgaaagaagccagacacgaggcttcataaaaggatacatattgcatgagtccatttacatgacaaatccagagttggaaaatccatggaggcagaacacagattgatgtttgcatggggtggagaagagggagcaacctcttaataggtacaaggtgatggaaaaattttggaattaaatggagctggtggttgcacaacatcatgaatgtatgaattgccactgacttttacacttcaaaatggttaaattcatgttatatacatttcatcttgataaagacattaattcaatcaaattcattaagttcaggtatgtcatgcagtatgtcctctgtccctttctcaaaggatttgcacctatgctatgaatctggggaagaatttatttcatcatagaaatctggtggctggaacctcctacaaaagcaagtgactgttccttccaagccagataatgcaataaacctagcacagggaaaataatacctggagatattaggtattaggcttgaacagttaaaggttaatctcagctgctcccccaccccctattttctcctgtggaaagtgagatccagggaagttgacagtgtgagaagtgtctgcagcacgaggccggcccaggggtcctggcttctagcccactccgttcttcatgaacacagagctttactcctcaccccatgaatatctactcagaccacagaaaaggggctctgtggagtctgagcccaccctgggcttggtccactatatcctgaacctggtagcatattacattacatcacatcacctgggactttaaaaatatgctgatatcttggattcatccaagaccaattaaacctgcatctctggagggggagcctgggaatttttaaaagcaccttgggtgattttaatgtggaggttgaggtccatgactgcatttcacccactagcttctagaatttccaatctttaccagtcctggaggggctcaggcaacatcatctcataactgagcccatcaggtcatgcatatgacctgactagcaactgccaaccatcacctacacagcccatgcagcccagcacctgcacaacccatccaatcatcacctgcatagtccacccagccagcacctgcacaatccacccagtcagcacctgcacaacaagccgaatcctcacctgcacagctcacccagtcagcacctgcacaatccacccaatcatcacctgcatagtctacccagccagcacctgcacaacccacccaatcagcacctgtacaacccatccaaatcatcacttacacagcccacccaaccatcacctgcacaatccacccaatcctcacctgcacagcccacccagcgagcacctgcctgtgacccaaacaaacagtcatcccacttggtctaacaattatctcccaggcactttactgagggacccaaacagacagtcacagccatcccatttggtctaatagttacctcccagacactttagtgagggttactgagatgtcctcactatttctctactagccccttggctggatcctttccaagcagagatgcagagtagccttcagctgcacacagcgttcccctgtgaaggacttgcctactgccccagcggtccttggacataggagtccttacagactctgaatgcaatcagagccctgagtcattagakcccaggaccctgaagtctctgtttttcaggcagacacagagcagctgccatagttcaggggtggggtttgtgccatcagccatttccaggagctgaaggaggtcagaaccctraccacagatgccgcctggtgctctcagccacaagaccaagacagcctccggggaccccatccctcaagcaagaagtcaaatgcaaaggtaatcatttcccacatagaacataaaaaaattcttactgaaatatctggctgcaaacgtcctccttttgctggaagctgtcggcagcataatgaagctggcagtctgtgcaaatttcttctgtatcctttttataaagaaccaaccacatcctcaagcagacaagctaattcctgttttccagtaacaggagatccacatctatagaaaagaaatatatttagaatgccctttatctggtattttcttggattttaagcaagaagcctcgctgtgaagaattagttcattaagcgtaagtgcatctagggatcttggaatggccttgagaaagtcacggggtcttggggtatcagttcctcaaatctgtaaaatgggaacaatagtgacaaccacttcacagaacaaagaattgagaagtggaaagaaggggctttgtgagcaaagccctcagcacacatcggatgctatatttgattttttttccatgagctgacctggattcaaggggagctgggtttccagaaagccttagaaataagtacaaacaacactgcaaatttgcagtgacttccaggatgcatttatggcctttgtctggtgggcacagcagtcctgttagtggggagagcaagtcccacagagggacagtcaaggcccaggagcaccccatgtgagaccctcaccaggcacacaggctgctcatggcatggcttctccattccatttctggaaatttagcatcattacagcataatttacagttgtggagaatcaaaaagaaaaatcccaattatgaaacagccaagcgatatttatgcagccatcagcatcattgacatagtggtcctggcagtccaaggcaaaggcaggctccaaggcggtggatacaatgttatctaaatgagggcagcattgattcagatggagcagtgactcctgggagggcatgcatcaggattttcttcctagcaccctccttgtctcctctgttctattgagcttgcatcacatttattgatagtgacctgaaacacctttcaattgcagagagcataaaagcagttaaaaaccaatcactgctataaagataaaacaagcatagccagtgctcagtggctcagtgcaggctagatccttcctacacctgggcttgtgggtgcaggaattggggctgtcaccactgcaggaaggtgcaccctgggctgcgggacagcgcttagtgggktgtgttgggggaatgtcatcttggcccatgccttggggatctgtggacagttcctgctgctaatgttctcagaagggagcgctggaacagcacagagaacggggccaamctgagcctctggggagtgaccagggatagctggaagcagaaggaggcagcaggcgagcactcaactgcttgaagagagcagcaagggccaaaacccaaggtgccagcatgtccttgcaacaaagcaagcagtaatttgggttgcaaaggccagagtgcaaggctgataagagcccacaggtacagaggcagagaggagtgagaggaagcagcccatcccacgacctggtgtacagggggctttggaactaaaactctaggacaaagtccaggttttccattttcgagtgcttggaatttagacatgggctagatttggcaaataaaggtgtaggatgcccagttagttttgcagtgtaactgtgttctaaatattgcgtgggacataatacctgctaaaaaggtatgtatagttgacctgaaacactattcagatttaactgggtatcctgtattttatctggcaaacgtataccttctgaatatccattttctctttgatcaaaaaagaaaataccaccaggtaagaaactttcaattgcagacaataagaaagtcagttaaaaagaggggatttattggctccttgagcaggaaagccctcataatatggacttcaggcatggctggatccagcagcttgacaatgttaaccaagtctgggtttttttttccagttctcctgtttgcttctggaatgcctgcttcattctcaacaaagtcccctcattattaaaaaatgctggacaccagctcgcttcaggaactaatactctttctttcatgaccaacacaaagaaagagcctatcttccagtgtctctctcagaagtgctgggaagctgcccctccctactctcccaaacatctcttcttgcctcatggccttggttggtccactcacccatccctgaaccacccaaaccaatgcaatgtgctgattggctaaagccaacctggtctcatcccaggaatagggtggcttggcttcgtaaaagccacctcagctggtatggaaaagaggtggttgctagagtggatgccaggcactgcaaccaaggttggggagaaggggttcaaaatacagtgcccacagtgaggttgccctaaggataagatacatgagactgccccgctggtgtggtgtgtgtgtaagtgtgtgctgtatgagaggagagagagggagagagagacagagggagagggggaatgttagttcctctccttggacatgctgattactttctttctttctttctttctttctttctttctttctttctttctttctttcttccttccttccttctctctcttttctttctctttctttccttctttctttctttctctttcttttcttcctcccttcctccctttctccctttctctgtttctctctctttctttctctctttctccttccttccttccttccatccttcctcccttcctctctctctttctttctctttctttctttctttctttcattctttctttctttctttctttctccttccttccctccttctcttctcttctcttctcttctcttctcttctcttctcttctctttcctcttggccagctcggtgactcaatctccttcctgtctcaggcccctcccacgaactggcccgtgtgtgcccggggaaggtcccttctcctcactgacctccacccacaccatggagagtggatgtgtgtgtgtgtgtgggggggggggggggcgggggacgctgcatcaggagacctctggttagggaatttttatcaggaaccacctctgtgacctttaccaacctcagcctatagtggggacaaggtcctacagcgtgggcctctcctttggaaggctttgggacagagttctgcccaccagctggaggacagtgacctcagggggagaagggacaggagactgctctccagtccctcaccccagccctcgcctttccctcacccacctttctttgcagcaagttcaaaggcaggtcatacaccagctaagcgggcacagctgggcacagttcccggggcctgccgggcagcgctgggaagggcggcagagagcgcggactggacgctcgtcttggaatgactcagccaggagcagccgccagcagcatgggccacgcagcaaacgggcgcgccgtgggagctggagaggccaggtcttctggaaccaggccagygcaccctgcccgggcgtcaccccaccacggacattcacaatgacagtcagcacttctcagcacactgtggatcacacgcattagcctggcacctggcagcgccccgaggtgggcatcacggtgggattgggaggcactccagtcacagggttcaccagggccgaggtggcgacgaaaacccgtccctcgggcgtggcagtggcctggccacgtgcgccccagggcttgcacccgcatctcccgccggtggtaagcggggcctccagcagagcgggcggggctgctcacctggaaccagggccagccgtctcctcccctgcctcggccgcccggggcctgcctggggctccttcctcgccgcccggcggcagctcttgagctcccggcccgctcctttagccccgcaggctccctggccgtgaccctgtccccggcctccgtgtgatgagcaggcgagcagggccggggggatgcagcctgggccccgcatcctcaggcaggacggagctcccggctgctcggcgcctctggggggggggggggcgggggcggcggggttttggctgtccgcatcccctactgcattgcgccttctgtcctcgtgtattgttgctgcctcgtgtctcacgtctgtactcatatcgccttgtagcgcggctcctctggtcgtgagtcagctcgacatcccctgctcgcgattgctatcgcccactctaccttctttacatctacatcatgtgttaagccggcaccgtcaagctgtcatgcatcactaacgtggacagtggtgcgtcgtcaacctgctaccctatccttgttgcggtcctctagttacatctccccgagcttggtccggcctcgcacctgactcactccccttcccacnnnnnnnnnnnnnnnnnnnnnnnnnnnnnnnnnnnnnnnnnnnnnnnnnnnnnnnnnnnnnnnnnnnnnnnnnnnnnnnnnnnnnnnnnnnnnnnnnnnnnnnnnnnnnnnnnnnnnnnnnnnnnnnnnnnnnnnnnnnnnnnnnnnnnnnnnnnnnnnnnnnnnnnnnnnnnnnnnnnnnnnnnnnnnnnnnnnnnnnnnnnnnnnnnnnnnnnnnnnnnnnnnnnnnnnnnnnnnnnnnnnnnnnnnnnnnnnnnnnnnnnnnnnnnnnnnnnnnnnnnnnnnnnnnnnnnnnnnnnnnnnnnnnnnnnnnnnnnnnnnnnnnnnnnnnnnnnnnnnnnnnnnnnnnnnnnnnnnnnnnnnnnnnnnnnnnnnnnnnnnnnnnnnnnnnnnnnnnnnnnnnnnnnnnnnnnnnnnnnnnnnnnnnnnnnnnnnnnnnnnnnnnnnnnnnnnnnnnnnnnnnnnnnnnnnnnnnnnnnnnnnnnnnnnnnnnnnnnnnnnnnnnnnnnnnnnnnnnnnnnnnnnnnnnnnnnnnnnnnnnnnnnnnnnnnnnnnnnnnnnnnnnnnnnnnnnnnnnnnnnnnnnnnnnnnnnnnnnnnnnnnnnnnnnnnnnnnnnnnnnnnnnnnnnnnnnnnnnnnnnnnnnnnnnnnnnnnnnnnnnnnnnnnnnnnnnnnnnnnnnnnnnnnnnnnnnnnnnnnnnnnnnnnnnnnnnnnnnnnnnnnnnnnnnnnnnnnnnnnnnnnnnnnnnnnnnnnnnnnnnnnnnnnnnnnnnnnnnnnnnnnnnnnnnnnnnnnnnnnnnnnnnnnnnnnnnnnnnnnnnnnnnnnnnnnnnnnnnnnnnnnnnnnnnnnnnnnnnnnnnnnnnnnnnnnnnnnnnnnnnnnnnnnnnnnnnnnnnnnnnnnnnnnnnnnnnnnnnnnnnnnnnnnnnnnnnnnnnnnnnnnnnnnnnnnnnnnnnnnnnnnnnnnnnnnnnnnnnnnnnnnnnnnnnnnnnnnnnnnnnnnnnnnnnnnnnnnnnnnntggccaggatggtgtgttccagctgcaacctttagcaggggccctggaagtgcttgtgtcttctgcttcgtccatcattagcagcagcagaaggtagggcagtgtttgcttctcaaaccaggtttctcacacattgaaagatattctgcatttaaatttacatgataaattaaaatataagccattgggatgaacaccttataatcaaatactcccaggtgacctagtgcctgagtttacctgagtgtttaaaatcaagttggcgacaaggaacagcgaacacgactgcctttaatatttagttagaccctggtggggtgaggctcccaggagtggcttccctttgggcccttcctctgtcctcccaggtggctgagggggacctacaaccctagtcagcagttgggaatccgtcctcatcagtgagctacctggcttccatgaaactagggtcgtgtctagggatctagtgttttggaagctcctggaaatgaggttggccaagagggtcttctggaaatctccgctcactgagccatcatcctacgccagtggtcaaattctgccagaaccacactgcagatcatgtttaattagagttcttagggtacttttgtttttacgtagcgacgttgtttgtttttttctagttgttataagcattgcagggctatctgttgtttcacgtgcttaaatatttaagccagtcaatgccggaacctagggatcgtttccaccttctttttgaaaagggtcacattactggaagaagaaacctggagctgattcacaaaggtagagtaatcctgtctgcagttgagagttgaagccacgaggtggcgccctcagcacactacttgagctgttgggttttccagcggcaatgaccagcacggggacagaggatgtcctgaagaggggctctgtccgcttcaggacgtccaggggagtcacctgtgtaacactcacaggaaatacatgcttctgtgggtacacagctgggaacagggtgaggcaagtgagttatcttgggtgcaaattttaaggggcaatgagcgcccctctcccctcaccctggtcccggccctgggccaccggactgggacatgtctgtgaggaccagagttggggagcggctccctgacaccccaggagagagggtgatgctttgacctcagccctggtcaggtggggcctacaccacggggacgctaaagcccctattctgatccagaggctgtggccggaataaacggatgtactttctgggaggggattaaggggatggacgaggtgctgccccatccctattcccactatgaattggagccacagggacatggagggtgtggagctgagccgagtgcgtccctggagtgccctttcctgtctgcactcgggctgggccagcctcctgtggctcctgcacatggcagcccccctcagctggaggagccacagtggagcaggcgtggagtccgtggcaccrtggcagggggtctctgtccagggcctgggtactcggtgacactgggagagaatgcagcctgcagcgtggcctcggaaactggaataagagagctgacctatgaaggaggcacgggaagctgggtgcagagatgaccgagaaactggcaaacattttggtaaaccagagcaccatgctgcrtgagtgaggagtaaccaaggtggaagtgttaaggatgaggtggaacgaatattcataccatacagtaactaacactgaacacagtcacctggaagagaagactggggagaatcgggacattaaggctcctgggcacttgcggtttttactccgggtcagcgctgtccaacagggatatagtttgaaccacgtctataattaaacgctttctggtagccatattaaaaaagaaacaggtgaaattggtttaataacatattttatttagggcaatatatgcaaaatactatcatttccacatataatcatttataaatattatttattgaaacattttgtattcctttttttataccaactctttcaaatccggtgcatattttacatttatagcatattccaatttggatactaaatttctgctgcaaatattttatctgtatttagagtttacaaaatttagagttaaaaaaagattttcaagttgttctaaacatgcgtttttagtaattggattgtgtatcaatttctaaattaagattaaataaaattgaacatttaagtgctcggttgatctaatttcaaatgtgattagtggccctactgtattggatagtgcagtggtaggcatttaaaagtaaagtattcatgttaaaaatgttaagaataacaagcaaagaatagaagtagaatatataacttctaaaccagtagagggggctgcatacaaaaaaaatcccgatcaattcaacagaaggggaagtgagaaaacaataaaacaaaaattatgataaatagaaacacaaaagaagaagataaaaataggtataaatgccataaatttatcagtaacagtagtaaatgtaaacagattaatctcacacattaaaagacagaagtacttaggttggaatttttaaaaatccagttgtagctgcttgtgaagagacatctaaaatataagaacacagaaatgttgaaaataaatgaatggaaaaagatatgtgagacaaataggaattaaaataaaactagtgtagtgaactcatattaatatggacaagacagactaaggaaaatctttattagggataaagattgtcattgcaagattataaaagaaacaattcatagagatacaacaatcttgagcctatatacacctagcaacatagcctggaaggaaagaaaacaaataaaagtctgtgacataatgtgaagaatttgaaaattcacaatcttagtggaaattttatgataacactctcagaaactgatagaccaagtagaacactagcaacaaattagtagagaaagagattttgaacaatgcattaagaaaacctaatataatagatacatgtagaagcctgtacccatggaatatttatagaaattgaccatgtaccacttcacaagagggttcaataaataaacactaaagaatcaatattactcaatgttgtctaaccttgatataataaaattatacaacaataagaagactaaaaaacatacatctaaaaatcatacatctaaacaccgaaaaatacattgtaatttgtgtctaaaaggagatattggaatagaaattacaaaatatttagaatcaaatgcaacatagaaccacaatttaagacttgttgtacacagctaacatggtactttgaaggaaatttatggcattaaatgtgtacattagaaaataagaaaggttgtaaattaattaactgaaaatttaactaaagaattaagaaaaagatagcatgtgatgacagttcagcttttattttctctcctaaatttagctttgaaggggaaatgggttctcaatgttctacacaatttctaactgttgagggttcccaggtcttagacttgagccttttctctcccaggtaatcttatccattcctacagttttaaaacaccatctgtgctgatgagtctcagtctcgagactagagctcacctctaagctacaggcatccttttctgactgctccgttaccctcaccctatggcatctcacacgtaacacgttcgaaacatatgctccaatctgtcccaagcttgtttctcctctccatgccaataaatgttgccacccacgttaactttaagcaaaagatgtaggggtcattcttgagtttatctgatgacttattctgtaagccttgtagtcacttctatttccaagatacaacccaagtccatccttttttctctctttccactattaccaccctagatgtgccactgccattcttgcttggcctcattcaagagcctctgcactggcttctatgcatgctctattgtccccaggccattctccatgcagcagtaaaatgtaaattggggcatgccatttccctgcataaacacctcaatggcttctcatcatgttgagcctcaagtccaaacttcctgctggatcttagaaggccctccctgagaggtccttgcctgtttctctagtttatcttggtcctgttcatgctcaatccccctaccctgccactgccaccttgttggcatttatgctttcagcatactggccactcaactcctttcttgccccagggcttttgtacctgcttcccacttcttgaaatgctccccacttcttgaaatgctcccccacacttcttcagtaaacacttcttcttttttttttttttctttttctagacggagtctcactctgttccccaggctggagtgcaggggcgtgatttccgctcactgcaagctctgcctcctgggttcacgccattctcctgcctcagcctcccaagtagctgggactacaggcgcccaccaccacgcccggctaattttttgtatttttagtagagacggagtttcactgtgttatccaggatggtctcgatctcctgacctcgagatccgcccgccttggcctcccaaaatgctgggattacaggtgtgagccaccgcgcccggtccagtaaacacttcttagtttgttgaatgaacaaatacatactaacctgttagcacagggatttttatccttatttcatagctgaggactgcaaggcccagaggggctgactgtaatttttcaagacatttttggttaaaaaaaaaaaaaacctaatggttttagcaaaacccttgagatgacctctgaatggaccatcatggatcatgtgcacagacctgaacccatcgttgcagctggggcagggaacagtctcatatggtgggccttggtcatgcatccatcccactgctgagggtggaatcagttccaaccaacacacatggtgtgaggatgagtgaggggaggcttctaaagcagctttatttgtaatagcctcaaactggaaacagtcaagatggttaaacaggtgaatggttaaacaccctgtgcacagccatgccatggattctatctagcaatgaaaaggaaaggactatgaatgcttgcagccacttgggtggatctcaaggacattacgtttagcgaaaaaagccagtcccaaaaggacataggctgcattatttcatgtatataacattctctaaatgagttggagagcagatgagaggtggccaggggttagggacaaatggggcagaaggcaggtgtgactacaagggacagcatgagggatagcttacagccacaggatagttctgcaccctggtggttacataaatctgcatgtaatacaactggagtgatagacattgcatcaatgccagttccctggttttgatattgtactaagttatgtaagatagaatcactgagagacactgagtcaaggggatctgggacctctttgattatttttgcaacttcctgtgaatctgcaaaagagtaggtactcactagtggcaacaatatacattaccagtctaacatgtgtacacatagataggtcttgttaggatgttgaaactgtgccaatgcatgttattattactacagttttaaagatttctctaaaaaatcaaaaagcaaaatgtatatgataattaaagaatacaaaaaattaaaaaacattatttgataaaattaaattcttattgtgattttaaaaataaaaaataaatctaaaaattaaactgttagcatttctggtgtttgttttgcatctagtgggtgctatgaagaatctatgtcatacttcacgcaagtgacattatacatccagaacaacacatatgcatctaagagggagtgagctgtttaatagcatgaaatatttccaggctgcaatgaagaaccattgtgaattttgcaatgatatataagtacctatgaaactatgaatttgaactcaaagagcagaaaaaaaaatacatgtctggcactattcagagatgagatttcttatggagaacctactacatttaggtgatctgagaggaagcctctggaagtttagatttttttcctattgcttccacgttcaattcctcctagacatggaagcaatgttcctgctggcaatggcacaacccataaacctaagctgatcctgcaagccaaatccataacatttggatccaatcacattttcttttgaggacatacatagggcaagagatgaggtgctggacaatgccagtccagtgagcaggtgtgcagggtcagggccatgggtcatgcagggcagcactgggcacacctctcgaggaacagaggtgcccattccatacatccatgaatagatgtgtgctgtttgggttctcatgggccctcaaagtgtagagtccaagatagggccctccttggtttcctggacaggtagcatcttagttcttatgtgggtatgaagtcactgctgactccatggccatgtgtcaccaggtttacaccttaccctccagcaggctgagctgtcagagcatatggaggctgccttgctcaccttggtctttccactcaggaatagcacacagatgctggggctcagaagcttttggggaaatgagctgcacaggattctctgtgggtccactgggagcccagctctgtggtctctccctgtgaagtagagcacaacctcgctgcagggagacttctgggtttgctgctcctgggccagggatctgctactgcagttatgccttggactccgtgccactctgaaatgcaagggcaaagacttcaaccaatgctgcttccagaccagcttatcctagtgttacttttggaaaatgctttcttcttgttttttaaaaaatttatcaagcattagtttctttagagatggccctccaaatcccttccctgtcagtgtgctcatgcccttcctcctgccaagaggtggaaatgatgctacagtagttctgcatgtagaccctaagaagcctggaagcttcactgtctttctctctggaagccaagctgtcatattttataagatttgcactgtctaacgaatgatgagagggcatggagggaaagagagtctgcaaaggaagagcactgaggcaccagtcttgtgaataaagcttcccttggatattcgagctcccagccccctagtgaatgcagccaggtggctctcagtccatgctgtgtggagcagaagaaccccccagccaagccctgcctgcttcctgtcccacagaattgtgagaaataataagtagttgttatttcaaaccaccatattttgttatgtagcagcagatatctgaaacactcctcaataaagcttgggaaaacttgactgttaaatgtttgattgagcacctactatttcttaggtctgtactaggggctatggctatggagataaacaagaaaaattccctgactcaagagctcactaatcaaaatggcaaggaggaaattataacagagcaatttgcagaatggatgagcaataggaaaagtgtaggggactgtagaggactaggagggagggagaatcctatcccacaaaggcaggatcaaggactgaaatctcccccagtgccaccacccagcaacaactactgggggcagtttttttttttttttcagttgcaagatttaatagagtgaaatagagtgaaaacagagctcccatacaaagggaagggacccaaaggcggttgccgttgctggctcgaatgcctgggtttatattgcaatccttgtccctcccactgtgctctcaggcaatagatgattggctatttctttacctcctgtttttgcctaattagcattttagtgagctctctgattggttgggtgtgagctaagttgcaagccccgtgtttaaaggtggatgcggtcaccttcccagctaggtttagggattcttaatcggcctaggaaatccagctagtcctgtctctcagtcccctctctcaacaggaaaacccaagtgctgttggtgaggttggctgatgaccactctaactgcttcctgctgaactggggcatagtaggggttgtgcagttgagatttcctcaggaggagtgacttcgatgtcattaacaccagagcatgggctagcaggccagtctaggggtccgtgggagatcttagacatggactgcatctggggttccatttgaagaacgatttgtagttttacagttttaattctggaagacacaaacttaacaaggtggttaaagatacagggattgaaatgtatggcctgcagtgcaggggattacttctttggcacacttcacaggccctgactatctgcttgatagttttgaaaaggcctggttcagtaaataataatttggccatctgatgggtgctatcgatgcctaagtggaaggtttggtgaaggcttttaagtaattttattggttagctccaggcaaaagtatttttccttcttcagtggctagccatctggaggggaggaaagtatgtccttgtgaggttccttattctatttttcctgctgaatactggggcttggtttcccggaggggattaccctgtactaggggcccttccataagcatttctaatggagggtcctgccttgcggctcttttgactttaagatccgcttggcggttcctttctatttccctttcctttcctttctggtgaccccaacagtgtaagactgccacctctttaggtttctgtatagccaatagtaatctcctaatggcttcctgatgttctataggtgttccctcggaaattaggaattccctttctctccatattgctgcatgggcatggaggactaggtaagcagacttagagtctgtatatatatttacccttttcccttctcctaattctagtgcccgagtgagggttattagttctgccagctgagcactagttcctggagtgaggggattactttcaagtattcctttattactgaccactgcaacccctgcttttcaaagtcctttttctacaaagggacttccaccagtatacaagttgaggttgggatcagtcaagggaacctctaaaaggtcccctcaagtggcataggtttgagcgattacttgttgacagttatgttctatcttttcttcattgtctgggacatatgtggctggattaagagttgcacaagtgcgcagttgcagcactggcccttcaagtaatagagcctgatatttaagtaaatggttagctgacagccacaagtctcctttagcagtgagtatgctgttcatttcatgagatttccacacagtaagatctcttccctgtattattttaactgcttcagatactaagactgggcagtttgtagcatttctctccagcgttttgtcagtggattgatttgccatggatgcagtgacaaagctggttataaataatgttgaagactcactatgtgctgggtgctgggagccattccactgcttcccttgaaaccactcagaaagaaggctactgctgtagtacccattggatagatgaggaagccgaggcttacagaactgaaggtcaggcagccagtaaggcacagaggcaggactcccacccaggcacttcaaccccagagccggtgcctgcagccagactgctcacctgctttctaacttaacattataaattaagcatatccttacggtattaaaaatgatgtctgaaacagcatattactcactgtataccatgttactttaaagtctaagattgaacacttcagattatttccaatatgcagagagcacttttccacatgaggagttacttttgtgtttatttatgggcccatattcttctatcatttaaaaaatggtttgaaggccgggtgtggtggctcactcatgtaatcccagcactttgggagaccgaggcgggcagatggccaggtcaggagatcaagaccgtcctggctaacaccgtgaaaccccgtctctactaaaaatacaaaaaattaaccaggcggggaggtgggtacctgtagtcccagctacttgggaggctgaggcaggagaatggcatgaaccctggaggcagagcttgcagtaagccgagatcgcgccactgcactccagcctgggcgacagagcaagactccgcctcaaaaaaaaaaaaaaaaaaggtttgaagcaaatgtataagaagccttctcaatgttggatcattttcttaggataaattcacagaagggtaaataacaaatattttaattttggggtttttcacaagaaatttctggaagcaaaaggcaattgatcttggtgggtgacaaagttacgcccatcaatatttacagcaattatccccacatttcacagtttctccggaagcacagagaggcacttctgcagaggacccagccagttataatgaaactgcccgtgaatttcttctcaaaacttgaagtgaatctgcggctaaggtttgagaattcaaatgtgccccctgggctggtccttcagcagacgagggcaaaaagcagaagtggcttcacctccctgcccttccccatacctcagaattgggctagcttttggtaggccctgctgcgggtgggtggcatgggtcatttgagccacacgtcttcttggtatttggtggtggggatggggactcctccttaagaagcaaatattgccactgttttgccttccctgggcctgatgtcatcccaaatgtcgcaactgctcatgagggcaggcagggagggtcctacaacccctatttatagatgcagaggctctggaaataacctgccctaccagctgcttctcaccctgcttctctggtgatgagtccttcttatgttaccaatgagtctgaaaacccctgggaccctattggccccagagccagggaggaagaagcattcctcttcatttcctcctactctcttatgtgaggtagtggtaagatcagacaaacctctgatatagtggtgtgctggtaaatgcttaacccacccctaaaaaaaagaatataaatatatatatatatatacatatttatgattgttataaattttactgctataaaggatgtgtaatgaacactttacaaataataataataaaacaggcaatactctatgttgtaaattccttatagttgattgattctaacagaatgctttcactgatttttgccaaacattggtatccctagccaatctatggtctcaatttaaccattatttgacaaatggagttgcattccaatccacagcactttatctaatacatttatagtcatgaaatctgatgtgtaatctgctgctaagtgatgtctccttcccatacaaactatattgattatcctgcagccactttcagattcagcactagcttatattggaacttcactcatttgtcaacgggtgtgagtgactttgtttacttggataatagttttcaaatatgggaaaaatattatctcaatctttgcactattcacaatgcaagggctatagacatagcacaatttaagtttaatctacattattaacctcccttttctgaagtctaacgaacaaaacaataaaccaagcccttgtttgtagggttttccaatttccatggtgtaaattctccctctgtggacaattggaagctaccaacatgacatccctacatgcagagttgggaaggaacatgcagtagccaccaggatagagggtttccaccactcagaactacaggcgtgcctcgcctatttaggtaacagcaaaatgtaatagagtggtgcattttgagtattaattacctttgtataataacataagttattaaattatatgtttatataatttaattttagttttaatggcacagaagtatctttcttctttctggatcaaccacatagaatttcaattctactgtgaatattatctttgaaatcacaatattgtcaatgctatatatttgctttctagtttttagagttgacctataaacaaagcaagtaagacacttttagttagctaatacaaatattttaaaccatgatgatataaaaataataatatagaaaacaaaagatggggaggagcaagggaggaagaataactacatcagtacagattgagtgtcctttatccaaaacgcttgggtttgtaacacaaaggataaatgcttgaggggatgggtaccccattctccatgatgtgattatttcacattgcattcctgtatcaaaacatctcgtgtaccccataagtatatatacctactatgtacacccaaaaattaaaaacaaagaaaattaaacaaaacaaaatgcttggaacgagaaatgttttggatttttgattgttttagatttggggatatttgcaccatgcttactggttgagcatccctaatctgagaatctgaaatctgacacagcccaatgagcttttcatgtgaatattatctcagggctcaaaaagtttcagattttggagcatttcagattttcattttggattagggatactcaacctctattcttgtctttcatagttgtgaatgccatcttaatttgatacataaaaaagtgaatatactatttaaggtcatgaaggaaattattgaaaggtatgtaaaatataatgaacagagttgaaaaggcaacatttagaaggataaaataaaaatataattacaaatcaggagtagaagagagtaagaaggagatagtgtaagcactctaattttcttattttttatgtctgaaggcccaaagatattgtcaaaaattcataaatcctaaagaagtttattagttgaagttataatgaagatcagaatatctaaaaacaactactcttggtgattatttgggcaaatggaaaatggtcaggggcaaaagggaaacttctttttatgttcttataaactgacttttgttttccaggtgcaagtattattttataagtaaaaagaaaccaatatctactattaaaaatgcaacttctgcttcctccagcctggaccttatttactttgcagtaatcccttttacagtatattttgatttccactatatgtagaaacatcccagaaggcctgaagtcacacttaattcctgtgtccagttctcatggcccttcaccttcccctccaccagcggggggtgggggtggggtgggggggttggggggggagcagaattctcctgttacactggagagctgccacattttgtgcctgtctacatcacagtaattcacaatgtgctaaacattgcactttgccatatggtacattcttatttttcaattctcattacctcacatgtataaacaaacaaacaaacaaaaaaggcttcaggaagttcagtgccctgctcagagtcctgcagtttagtggcttacactggcaggttccttctctcctgcagcagagaattaagacagagaatccaatatccccagtgtatcctcccccagaaaatgtggtgttcccccgacaaaaagaagtcaatgtctaatgttcccatcttgtctcataatccctttcaaaaaggaggaattgctgtctgagagggtattttgttccccagtgactgagggcagggcaggggcagggaaggcttcccctctcttctggccctagaggccctgtaaatgcactgtgcagtcactgacgtgccctcaggcagggccctggcgggaagggggctgttccaggtctaccagcttcacacccttattctattgaattctcatgaaaacaaaatctgtgaaacagctgtgatcttcattttctgatgagggaacagagcctccgtgcccccgagatcactggtatgactccaaagattttccctcttgcccccgctccagcaacgggtggcgggaccaggacctgtcccttccgcctgggaacggtgccctggggcagggtccccaaggctcctctccaccgtggaggctgaggccaagcccacggcacagggcacaggctctggcggggcgtgttcgaggttrggcgtcagcggaggccgcaggggctcgggcgaggcagccactggagcgcggagccggccccacctrcagggcccgggcttcccctctgacaaaagctgctgtcgggaggggctgtaaagcagcagagaagaccaggcgagggatctgcaccagaggaagggaggcaggcctttcctgtatttatctctgcaggagccgggagggaagctcctccacggaaaagtgtcaaaccttgcccaagctcgcaggtccacgagcgaagcccccaccccctcttcccgcgctgctcccagggggctgccaacctcgacctcacgcagcactctgtccccaccagccccagcctcccaggcccagagagcgtggcccatagtccccttggcgtcttctcactcagcgtgccccctcctgtgtgtccctgggcagtctctcaatgacccgctgtaaggggccctcttaggggcaggagcgtctggctcctgtccctggctgagacccgtctaggctgccccgcgcagggcctctcccaggtgcctccctggttgtggcgggaacagccaggtttgttcactgggagctggagtcctggccttgggcgattgctctgactagggggctgacccccactgacccagtcacctgatcaccatcaccggccagatcccaccccacggcacttgggtggtgcaggtgttcactgggccaaactgaggtgcatgagcagaaagcatctctctccgcagggctggggtggatgccaacactggcccctggggttgttggtgagaaacctcgatcagcaagaggccagggagtgctggaggctgctctggggcttccgcccgctggccgctgaggtgagatattcaaatatcggtgggcgggtttttcccaggttaatcctctcttaactgactgcacagcccagagggaaatagaagaatctccaggccaccttcagaaatgaagatggattcctcgcagagtgctagcaggaagatacctgatgggccgtctagttcaacagattcctccccattccacagacagcccagagaggagaggcacaaaggataataatgacaaagaatagacatgactgtgatccagcagctacatttgccgtgtgcccacttgcgtgccaggctttgggccagctgctctgtgcacttgcttttcatgattctgccaggtatggatcgatgtacccactttacagatgataaaaccgaactccaaggagagaatgatatgaacagaagctatctcagagctggaggcttggttatgctccttactcaccccaccacattgaatccctcaacaagctgtcagcagcgacgtcattagtttcatttcacagatacacctctgaaatgaactcgtgttttactttggtctcccctggttttccaggcctccaagcagcctctggggccaccttccctgctggccagctgtgtcctttcctgctggaaccacccagacccaggctccccatgctcatcagccttgagcctagcatctccttgggactgacctgctgggtggccactcccccagagccacctactcactattacctgctagatgccttgtaaattctctttatttatttatctttgggggtttgtatgattttgtttgttacttgtaaacagtggattcatttgacttttatcaagtcatgtaaatggatctaattttattttttggtatatgtctacctggttatcccaacatcatttattaacagtccatctttccccactgatttgagatgccacctttctgtatgatacattttcacagttgaggctatttctggattttctattctgttttgttgttctctgtttattcctgtgacacactgtttccatgataaaagacttagggccaggcatggtggctcacacctgtaatcccagcactttgggaggctgaggcgggcggatcatgaggtcaggagttcgagaccagcctggccaacatggtgaaaacctgtctctactaagaacacaaaaattagccgagcgtggtgatgggtgcctgtaatcccagctacttgggaggctgaggcaggagaaacacttgaaaccagaaggcggtttcaagtgagcccagatcgtgccactgtactccagcctgggcaacaagagtgaaactctgtctcaaaaaaaaaaaaaaaaaaaagtagagcatgttttaatttctgagaaacccagccttccctccttgctcgcattctctctctcttttctttcttttttttttttatttttgagatggagcctcaccctgctgcccaggctggcgatttcggctcactgcaactttcgactgctggattcaagtgattctcctgcctcagcctcctgagtaactggaattacaggtgcatgccaccatgcccagctaattttttgtatatttagtagagacggggtttcaccaatttggccacgctggcttcgaactcctaatctcaagtaacccactcgcctcagcctcccaaagtgttgggattacaggcatgagccaccgtgcccagcctctctctcttttttcaaagtaacttttattatggaaaaaaattgaacatctataaactgagtatagtaatataatgaacatccagcctcaaccttgattaacattttgccatttttgtttcatttatgcccactccttcccccacttaattattttcatagtttttcaatgtacaattttatgcatgttgacatgcacaaaccttatctgtatggttctgacaaatttgttccacaattgtaacacacattcctatgaaaatattaaatattttcatcacctcacaaagtttatgcttttatccaatcaatagtcccttcccagggcaactgctgttctgattttttttttcaccataggttaattttgcccgctggagaatttcatatgaatggaatcacagtatggacttttttgtgtacaaccacctatagtcaagcttaatgcctgtgagaggaatccatgttgaacagtgtatcaatagttggatttttttttttactatagagtagaatttcactgtatgaatataccatggttcatttattcattacccattaatgaatctgtgggttgtttctggtttttagttagtatgaataaagtcattgtgaatatttatgcataatctttgtgtggacatgtgttttcatttttcttggctgtgtctggtggtgaaatttgtgggtcacatgataagtatatattttactttataagaaactgttaaattgtttatgaaaatggttgcatcattatacattcctgtaagcaatgtaggagcattctagttgctccagttgcaacatttaatgttgacagtctttaaaattttagccatctaaacgaatgtgctgaggtatctcagtgtggttttagtttgcacttccttattaattaataatgttgagcacattttcatgtgctttttagccatttggagaaatataccatacatatgatatataagtgtatatataccatacatatgatatataagtgtgtatataccatacatatgatatataagtgtgtatatgccatacatatgatatataagtgtatatatgccatacatatgatatataagtgtatatataccatacatatgatatataagtgtatatataccatacatatgatatataagtgtatatatctcatatatatgatatataggtgtatatatctcatatatatgatatacaggtgtctatattcatatatatgatatataggtgtctatatctcatatatgatatataggtgtctatatctcatatgtatgatatataagtgtctatatctcatatatatgatatataggtgtctatatctcatatacgatatataggtgtacatatctcatatatatgatatataggtgtacatatctcatatatatgatatataggcgtacatatctcatatatatgatatataggtgtacatatctcatatatatgatatataggtgtacatatctcatatatatgatatataagtgtatatatctcatatatatgatatataagtgtatatatctcatatatgatatataggtgtatatatctcatatatatgatatataagtgtatgcatcatatatatgatatataagtgtatgcatcatatatatgatatataagtgtatgcatcatgtatatgatatataagtgtatgtatcatgtatatgatatataagtgtatgtatcatgtatatgatatataagtgtatgtatcatgtatatgatatataagtgtatgtatcatgtatatgatatataagtgtatgtatcatgtatatgatatataagtgtatgtatcatgtatatgatatataagtgtatgtatcatgtatatgatatataagtgtatgtatcatctagatgatatatatataagaatatatataagtatatatatatcatctagatgatatataagtatatatatatcatcgatgatatataagtatatatatatcatcgatgatatataagtatatatatatcattgatgatatataagtatatatatatcatcgatgatatataagtataagtatatatatatcatcgatgatatataagtatatatatatcatcgatgatatataagtatatatatatcatcgatgatatataagtatatatatatcatcgatgatatataagtatatatatatcatcgatgatatataagtatatatatatcatcgatgatatataagtatatatatatcatcgatgatatataagtatatatatatcatcgatgatatataagtaaatatatcatcgatgatatataagtatatatatcatagatgatatataagtgtatatataatcatctagatgatatgtaagtgtatatatcatctagacgatatataagtgtgtatatatcatctagacgatatataagtgtgtatatatcacctatacgatatataagtgtatatatcatttatacgatatataagtgtatatatcatctatataagtatatatatcatctatataagtatatataatatatatgatacatatgatatagatgatatataagtatatatgatatatatgatatataagtatatatgatatatatgatatataagtatatatgatatatatgatatataagtatatatgatacataagcttatccatatacatatgatatatatacatatatatcatatatacatatatatcatatatacatatatatcatatatatcatatatatgagatacgtatatatgatatatgtatcatatatatcaataacaggatcgaggctggcccatggctggtctacacttcccagtcttccttgcagctcgatatgacatataagtatatatatcgtatatatgacatataaatatatatatcgtatatatgacatataagtatatatatcgtatatatgacatataagtatatatatcgtatatatgacatatgagtatatatatgatatatagacatatctatatatgatatatatgtatatatgatatatagacatatatatgatatgcatatggatatatatatatgagataaagtgtctcttcaggtctttttttcagcttttattgggctgttcatcttttgattattgatttgttagagttgtttatgtactctggatacttccttggtcagtaatattttctccctgtccatgacttgcctttcatttactaacagtgtcttttattagaagaagttttaaatttagatgaagtctaatttatcaatcttttcttttatggttattgctttctgtatcctgtccaagaaaaactttgtctcctctcaaattgcacagatattgtcctatgttttctcctaggagcatggtaactttagtttttaacatttgtgtctaagaaataatgtaatccctaccaaaattctaaagtcattcttgatagaaatggaaaaaatttctaaaattcatatggagccagaaaatacaccaaatcttgagctaaaagaacagaacaaggctggaggcatcaccatctggtttcaaaatatattacaaagctatagtaatcagaacagcatggtactgccaaaaaaacacatcgaccaatggaacagtacagataatgcagaaataaaaccatgcatttatggtcaattgattctgaacaaaagtgacttgatttgttttcattatggataaccatgtcgtttcagccacacttgttggaaaggcttttgtttcccatgaatctcttttcaaaacattccctcaccttccatactgccattccccttccctttccaagcctgctgctcactgacatcctccctctggtcccacaggaccttcctcaaagtggagactctgtagatagaacctcatttctggcaaagctgcatcactgatgtgaagaaataaagcactcagagttaaactgaagtttcaactctttattcttacttccccaaaattaaaccattttggcatgacaggtgtgagtctgtgcatggtggctgagacctgtatggtgtgtgtggtgtctatgaacttccccaaagacagactggaactcgccacactaggcatcttgtatagcaccaggcatatggtagtgtggagatggtagaggaatacatggatacataaatcatgagaggccttatccagcaccttattggagctcatacccaaagtgatgccagcactcttgatctcacacaccaaagataaatgtgcttagcctcaaggacttgttcttagcttgaaagctccttggggaaagcattcttatttattatttgtgcctccaaaacacaccttaggacttggtcctggaaaatcctagtgccaactgaaatgggttgaatggcctgtgttcacctggtgatggctcatggttcttcatcttctcagtgggctccttttgagttttatgttaactctaccaatatggagttggatcttcaggccagctttgaaaattatgacagaattcgctcatttgtagttttccaatcctccctccttyctccaagtctcatgggatgtcaacagtggtattgatcatttcttctgcaggctccaggtgtcctgtgggtttatcttccatttgcaccagtactcacatctccctgaaagtacaatctgatggtgggatcctctctctttttctggagttaattactatccccttggggaatatggaaatgcaaccagcacacaggaagctgctttctctccaggtttgttaaacatgtcctgttgctgtgtaaatagttttctttttttctcccaagatggtatagaaaatacattgtaataatgaagtagggaagtgcttgcaatgaattaagtgaaagaaaaacccaaccaattatgaaggggaatatatggcatgattcccatttgttaagaacaaaaaataagaccaaagaaatatactttggtaaacatggaaaaaaagactgaaatgctattgctcagcatagggtattagtgagttttattttattccttcttctttttatttttacatactatttagaattaacatgcttcattttaaaagtcagaaaaatatttatttttaaaagtattaactttttagtatatggccctgataagtgatggtaagtgctctgaagagatcatagtggagaccgacagcctaccaaaatgcattctctctaataacaggatcgaggctggcccatggctggtctacacttcccagtcttccttgcagctcgatatggccatgtggttacaatagcatgtgagccaaagcgatgtagaccactcagaggctgggcctttatgggcagaggtatgtcttgtcttgtccactccctttccttttttacaggctggatgcagacgacaaggctatatgggacaatggagcaatattcctaaattgctatatgggggagaaccacctgccaacttgaacaactggtgtagactgctctgcagcaaggaagtaaactccatagcagctctgctctgttcatcattgtttcttcagggcctacctgggacctggcacagaggagatgctctgtgtgtgtttgttgattggaactaaacttttacttttctgacatctttgtcacaaagccatgaagaaattacatatccttatgacaatttacttagagtaaataaaatactatttttgtgtaaaatgtgagattgcaacaatatgcttccattgatttctcagtctttggtgctgtagttgtgaaatacattctatccacgtatgctatcaactccaaagtacagcactgcaattttcactttaagcagtcatagtcttttaaagaagttaaaataatgaaaagtacatggtttgtttttatttactcacacatttgctattaatagtgcttttctttttttcctatagatccaagtttccatctggcatcttttcccttcagcttcaaaaactgcctttagaatttcttatattgcaaggatgctggagatgaatgatctcagcttttattcacctgaaatgaatgtattttattctcatttttacagagacattcattggctattgaattattggttaacaatttttgttgttttcctttagcatattaaagatgtctttctattctcttatggcattcactgcttctgataaaacatcagccttaaatagtatttttgtttctctttgggtaatatttttttctttctgactgctttcttgctctctgactgttttaagataatacatttgtttctgatgtttgactatgatgtgctaagtgtgttttttctttgcacttggtgatgcttgagttttactaaatttatcatgtctgcaatttgccgtttttcaataaacctgggaaatttcaaacatcatttctgcaaatgtgcttttctgccctcctctctctctgagaccccatttacacatatattataccatttcatattgtcccaagagcagctgagtttgttttttttcatcaatattttccccctctgtccttcaaattgtataatttttattaataagtctttaagttcattaaccctttttttcctgtggccaccaatttgctgttggtctatcagtaaaatttttacttcagatatacttttcagttctagaatttacatttgaatcttcttgtattttcgatttttttttttttgctgaaatttgcctgcttttttttttaagttcctgaatatatttctgatagctgctttaaagttcctgtgaaataattccaacatctggttcatcttggggtctatttctattgacagttttttatttcttgttatgggttacattcttttgctttttcagatttctactaattttaactctatgctagatagcatggatgttaaattgaaaggaggctgcattaagttttcttcctttaaagcatcttgagttttgttctggttggcagttaaattccttggctgcagtggctcacacctgtaatctcagcactttgggaggctgaggtgatgggatcgcttgagctcattagtttgagaccagcctggccaacacggtgaaacagtgtctctattaaaagcacaaaaaatcagctgggcatggtggcacgtgtttataatcccagctacttgggaggctgaggcatgagaattgcttgaagccaggaggtggaggttgcagtgagccgagatcaccccactgccctccagcctggaggacagagccagactgtctcaaaaaaaattactggaatatccttttaattctgtcagtcttgcttcttttattctttgtttggttgtattagggtcctccagagagacagaaccaattggatatacatatatatatatatatatatatatgtatatgtgtgtatatatctatatatatacatgcctgctcttgtttgtttatttctttatgtattacaaggaattggctcatatgattatagaggatgagaagtcttaagatcttcagtcaacaaactggagacccagaagagccaatggtgtaaggtccagtctgagttcaaaggcctgagaatcagaagagccagtgttgtaagtgttccagtccaagggcaggagatgactgatgttccatctcaaggagtcaagcagccaaagtgtcctcttactcagccttctgttctattcaggtcttcaaccgattggaaaccacccatgcatattagggagaacagtctgcttgactcagcctactgattcgaatgttcatctcatccaaaaataccctcacagacatgcccagaataatgtctcgccaaatgtttgggcacctcatggcccagtcaagttaactcataaaagtaacttatcacatggagctattttatttcaattttgaacttgttccaactttatggcttttattctaggctgtggttcttacttcttcagtgtggagtctgagcttcagagttttatggttttaaatttcctctcatcattaccttcatgtttagcctgcaggaggactcctctgattggtgtttcaagtttggtctgcggattggggaggaaggaatacaagagggcagctctgagcttggtggggtgagggctctgaggtgtaaagtgaagtcccacaatgctcagcaaggtctctccacactccatgggatgcgactgcaacattccaagcactgcacattctctgttacctccttcagtgctcggccttgggtcagttgacctctgctgggtctcttggagtctcaccctgtgcacacataggaatccttggccaagggcacacacaatgagttcccacaaggcacactctcctcaggaacctgccctgaacataccagagccttcagcagctttgaactctgacttaaaccttttcagttcagggagactactgtctctggggccccacctgcctgcatcatagcagaaaaagcatcactagaaaaaactccagggcaattgtggggctcaccttgtgtgttttccttatctcaaggatcacagtcttgctattcaatgcctgaaaacaattatcttgtgtatttgaactattctatagttgctttcaatgggagggtatgtcctataccagttacaccaccataactgggtgcagaagtaaaactgccattttggggcaattgtttaaaaatcagagaatcttacattgccctttaacaaaaatacacatttacattagcagttcatagttgccctggctgcttcagtgtcttagctttggcaactctctcactaataatagcttgcatttgcacagcccttttcagtatttaaaaactctcttggccgggtgcgctggcttacgcctgtaatcccagcactctgggaggccgagatgggcggatcacgaggtcgggagatcgagaccatcctgtctaacacggtgaaaccccgtctctactaaaaatacaaaaaattagccaggcgaggtggtgggcgcctgtagtcccagctactcaggaggctgaggcaggagaatggcgtgaaccccggggggcggagcctgcagtgagccgagatcgcgycactgcactccagcctgggcgacagcgagactccgtctcaaaaaaaaaaaacctctcttgcaaatattatttgatttgttccttctaacaaggcattcattcattctgcaaataagatgtcaattatctcagttaagatagtgagaatttcaaccttgagtttctagctctgaatttagtgctctttacctgcctgctgctggctacccggcaaggtgctggggtgggtagaaggtaggagacctgggtgcaggtgggccctccagcagactttgcgagatcccactatgacagactctccgcgcttcctctgggcattcacaggcatggggtcctggcctgtcccatgctggccacccttcctgcctctgtggaagttcctctgtctaatccgctcttaccataggcctctgatttcaggcaatatcttcttgtagattttatttatgatttcattggtgacaatgacgaggggttttcatcatatacaacaaacacttcactgcaaattctctaaggttttctctttcccttggctggcactgcatgtatcctttcaatttctcttttcttttcttttttttcttttttttttttttgagacggagcttcgctcttgctgtccagactggagtgcagctggatagatctcctattttggctgctgtctactgacaagtttgcactggtggaggttgaggttttgtgacaaatgttattttcctctttaaaccaatcttggagctttactccatgtcataacaagtgatgttgttgctgcctctcagtcagtcatgcatggtccactggttttgtgagctagagacaagcgatgagctgcactgaggatcaaggatcaggcattagcgctaacaagtgcccttgctctttggcaaaattctccttttacagagcacaagcaggattgtgtgtgaatggacatgcttgtttgtactgtggagatgacgttatggataggtgacatggataattcagcctagtttatatactcagaggaatgagaatttggagtctgagtttcagagacttccattctatggttttagatgtcctctcatccttgcctcagtgttggccgcaggaggactcccctcattggtggttcaagttctatctgaggatgggggaggaagaaatccaagtgggcaactctgagcttggtggggtgagggctgcccaacccatgccatgtccaggggtgcacttaaacacacctctgattagattcacctaacaccatcattgttctcattttgccagaggcccagagaggagaggtgtgcaccagtggtcacacggctagtgaagaggggacacagaatccagacctactcttctagggctgggctgtactttccattttgtccttggccccaaccagcaccgcttgaccacggaggctgcacagccagccccaaggggccttgctgcagaacccaagtcacccgccagaactccagcagctccgtggtcggctggagagtgggcagagtcaggcatctgccggctctccacttctgctttctccaggaaatgagcagagacccagcwccagtgattcagagtgaaacggcgctgaggactgacgatgtggggccgggtcctcttcccccgagcctgaggggctgcagctggggatagggggcccatgccttctgatgtctacaggcgctgacggccacccctccaggtaggccaccttgctcttggcccagccaggccagcctagaggtgggcatatgggcgccgcctgtcagcgtggggcctactggctgcctcctgggaggctgactatggggcacatgtgacccagtgcctggtttgggtttgtgaatgtgggagaggaggtgagctggggagcaggaagtgtgtgtggcgtggggggcccatgtggtcagggccactccagggcctgggtctgcctgagtgtgtgtcactgctgaagtttgggagtcaggctgggctccagcagcactcctcgacctctgacggtaggtcaagtcctttctcggggtcctgctatgaagggaaccctgggaagggctgacacgggctttcctggttgtcgagggggcggagagagcaggccgacaggacagtgaggctcgccctccaagctccctcataggcctctgaggagtgcagagttggagggccatttccaacgggcctcagagggagctggtctatcccggccctgtcattactccactgggttctggtaagtaggtgcctccctgggctcacttccctcatctgaattattacagcaaaccattgaaacgcctgcattttctgcctaagcagggccacctgctcagtaaggactgattcttcttttcccctgaaatgaaacttctagaacactaaaccgatcctttgtcccaactcatctaaagtgtgggggggctggtttgataactaagggctctatgcattaccctttccatggagcacactaattttaatatgagtttatgtatagtcattcatttagttatttaacaaataggtattgagaaaccacgccctgccaggctctggtcaaagcggacaggggtctacggtgctcagcaggtgggagaatagcaggtagggtgggggtcttgggagggtggggatggctctagtcttctgagaggggacctgtgagggaggccgagtcctgtgggtttctgagaagtgttcttgataagggtctggaggaggagacctcgtggaggttggtgtggcagagccgggtaaggggcatgcctggggttctggccagagaggtagggaacagggtcaggtcagggaggcccttcctgtctgtccatcctgagcacatgggctattctttcatgaacttggaaagattttctgtgttgaaagaaaagaaaatttcggccaggcgcagtggttcacgcctgtaatctcagcactttgggaggctgagaggggcagatcacctgaggtcaggagttcaagaccagtctggacaacacgatgaaactccatctccaaaaaaaaaaaaaaaaaagaaggaaagaaaagaaaatttagaaagaccataataagatagaagtaataaaaacagcataaaccctgtgtgctgacaccttagatttttttaaagatcagcatcatctctgaggtcctcttcatgcccatctttcaccttccctcttcagaagcagcaacagtccagaattttgggtttattgttcccttgcttctttttctaattttacatcccatatttaaatcgctatatatgtatgattgcaagttgttgaactctgtaaacatggaattaaatattcttttaaaatttgcctaattggttcaaaagtttgtttctgaaatttcttcatattgttgcatgtacctgtagataattaaagttttctgcagtacagtattctattagatgagtgtacctcaatatatttatctgagatgctgttgatggcattttaggtatttcaagagtttatttttttttctattataagcagtgccgctagaactatttttgtacatgcatcttggggcatgtgtgcaagaatttatcttgggtatatactctagaaatagaattggtgggtcataggttgtacatatcgtcagccttactggatgtcaccacgttgttttccaaagtttttgcctcattttacccacccctcagcaatgcaccaaagtttctgttgctccacttcttcatcagcatttgatattgtctggtactgtatttctgccaatctggtagaaatgaaaagctatcttagcatgtttttaatttgcattgaccaaattactaaggttggacatctttttcatatgtttattggccatttggggtcccttttcctgttcacattttttggccatttctcatcgggttacctgtcttttatcctattgatttgccataattcaatacatattctgggtactactttttgtcatttatatatataacaaatatttttcatttgttggtgccttgtctccttatattcctgtggtttttattaatgactgaatttcttagtttcaaataagtttatccacctgtcgctttatgatttatacttgttatgtgttatctaagaaattctccactataaggttgtaaaattattctcatattattttcaaaaaatgttataatattactttttacactgaagtctctagtctgcctggaaatggcttttgtgtatggcgtgaggtgggaagaaactttattttattctgcttttcccatatggataaccaagagtcttggcaccatttatttaataggccattcttttttttttttttttttgagatggagtcttgctctgtcacccaggctggagtgcaatggcatgatcttggctcactgcaacctccacctcccaggttcaagcaattatcctgcctcagcctccctagtagctgagattacaggtacatgccaccacacctggctaattttttttttttttttttgagacagattcttattctgtcacccaggctggagtgcggtggtgcgatctcagctcactgcaacctccacctcccaggttcaagcgattcctctgcctcagcctctccagtagctgggactactggcgtgcgccaccacatctgtctaatttttgggttttttagtagggatggggtttcactgtgttggtcaggctggtcttgaactcctgacctcaggtgatccacccacctcggcctcccaaagtgctgggattacaggcatgagccaccacacccggcctaataggccattctttagtcactgatccatgatagctctgttgtgagttgagttgtcatgtgcatgggggtctttcctggttctctattctgtcaatttgtctaaccctttgacaatgctagacaacattgttaaccacaggtttataataaatttcggtatctggaaagagcctccccattcttttcttcttccatcctgtcttgagaattcttggtattttactcattcatataaatttcagaattggctttcaacagaaaaaaaaactatgttcagatttgactggaaatataatttggaaagaagtgatatctttatgaaaatgacttttccaattcataaacgtggtctgtctctccacttatttaggtcttctctaaagtatttaaatacaatgttactattttctttatagcagtagtgcatattttgactagacatatccctaagtggtttatatttttatattgtgtcaattgtcattaaaatacatttttggactgttgctatttggactgattcttgttcaaaatgcaagcattttaaacaagaatcattttaggtgtcatgtgaagattgtaggagaccaaaggaagaagcaagactatcagttcagaggcttttgcaataacccaggctagaggtggtggtggcttgccccaaagtgataatagttgagataatgacaggtggtcagagtggtcagattctagatacttttttgagggtaggatttgatgacattttaggtatagagcatgggagaaagagagaagctaaagatgactccagagtaacaggaagaatgagattatcacctactgagctggcttgagggcagtagaagcagatttggaaggtggaagtagaagcagaaatatgagtttggtcatacaaagatggagatgcttgttagacaatatgtgaagaaatgaaggcttggccccctccacccccaccccagtgaacttcatggtagacaagcaaggcagcttggccaactggcagaaagaaggaatatatcttgtgtaggagggtaaggaaaatgaacttctcagagttcctaaagccacaccttagagctgctacccgttttatttacaattaggggcttgcatttgtaatctccctccaagtgctataaaccatcaaaatgcagatagatgatatctcctaaacccttggctgccagtcccctttgaggtatctgcactccttaaaaacttaaatatcaaagtctagacctttgttatccaatacagaagccactagccatacttgaaatgtagccgatgtgaattgagatgcactgtaagtgtgaaatacacaccagattttaaagatgttacaaactaacaacaaaaaattataaaatacctcagtacctgaaaatattgattacatagtgaaaatattttggatatattgggttaagtgaaatatactttaaacattaatttaacctatttatttttatttttaaaatgtgtctaccagaaaatttgaaattacacatgtggctggaagttgtgcctggctttctatttctaatatttctattggacagcagcctttagaggaatgatacttcttgttttatggccagaggctttcatgggaatagagtttgagatggatgagaggtaggagaagtgaaaagccacttgaaccaaataattccaaggagaaagaaaatatacaagctaataataatgggtttagtacctaaataaaccagggacttgtacttgcaagctcacttaatcctcaagatgagataagtttcattattcccattttacagatgagaaaatggagactcagagatgtaaggttctttgcccttgaagagtgagtgactgagctgggatttgatcctagttccacctgattttaaagcctgtgcacttgcattagaccacactaccactaaagggctgaagaagctacacttctagaaaggaatagtgaatatttggcaggagtatgacagtggttcttcccttttggctgaatgattaattcttcttttgagaattcataggaaacaaaatcattgcagcagggatccttcccctcagcattgcccatgacagcagtggagacaatctgagcatccagttattacagagtgagagtcaattatgggtgatccatcaggaggatgctccatggtcactaggtctgatactttaaggaaaagggcaatgtagaacatgtttatgatatgatggatgattaatgcaatcaaatcattttcacattaattacaagcaaaatatacttgtgatatgggatgtttggggtgttgctttttctggccagaaacctctgtggccagtggcacctttgcctgagttcttgtcctgcatccagtaagaatgagggatgcagtcatgtggagggtgagcaagatgaagaggagctttattaagtgttagaacagctaaaaggagacctagtgggtagcttctctctataggcaggttgtcctgatgagcactcagctctcagcagaggggatatgtcctctctgcagctggttgtccctacgtctgcagctctcagcagagaggaggccctggagaaggtagctcttctctgcagctggtcctcctataatcttcccagctctcagcagagagtaactcctccctgcagctggtcatccagtcgtctctccatcctctgctctgttctggctgaacccagggtttttatggacctcagaggggaggaaatgagagccaactgggccataggtggccatgagcagcctgaaaaagacaacacaagtccccactctggtttgtgggtctggtagcccagcccccagccttcaggccctccttggcttgaaggtgggaccttaccggggccctcccccactccacccaggagcctatctgccccctgctgccttccatggtgccctggctgttcatgccaagggatacctgaaggccagtgcaagtggccttcaaccccttcccctcatcacagcctgaggcaggggctcctgatcctcactgggtccaggccagaatttgggacaggggcaacatcaacaggagctccccctgttgccaaggctgtcaggacccactggggcagagctaatcaagggtccgggctggatgtgggaagtggcaggctcggtggtcaccctgacttagggtggcagactgagacattgccctgggtgtcctgtgcagagcctcctcccaaggcgcaggagcccagcacccttggtgtgggctggctgggtccccgaagtgggcaccactcccactttccacccgggcccctaagcctgaccctagctccacactggcacccctctctgcctgaccatgctgctctcctgtcacgctgctcccctgctggccggctggcaacccggcctggctccatcatggcagcccccagcgtagcgggctgctggagttggggggctgtctgcctcctccccttgccctccctgcagtggctggcatgatggcagtggccgtaccagacttcctgctgctgccatcacttggatgtgaaaattagtaggcataaagagaaatatttgttgatttttgtgttttccatgtaataataagaaaatttctcagtagcgctctaatatcgacttttaaaaggataagcacaaactagaaagggaaatgtagtcaaagataaaggtatgtacacataaagaaattgtgtggaggatggccaaaacatgtgagcaattagtaacgttaaaacacgctgtcaggaacccactgatcaactgtggacagaatccagggagagtggccctgtgtgcagaaggctgcagggtggcagatgctataacagaggcagggtcgagcacccctgcagctgtttgttcccagagtctctgccctgagaatgcctgttctttaggagaaggaggagggtagcaattaaaagggtgatgaagcccaggatggggggtgtgagcctcagggcacaggctcctaagccaaccaggaaccaagcctgcatgtccaatgtatgcatagcagctccacgtggtctcagccttcgagtggtgtgtagggtgattgaatggccaggcagatcagggtggcaaatgcccagatattcaaaaggggaaaagcccagggcactgccctgctgtcagatcacagattcttgtatttccttttagcctcacacacctgtgggcctgtgggccaggacacctttaccctatccgagtgacaggaacagaagggcgggacagtgcccctaggtgagtctacacctctgccagtgggcgggatcctcacaatcaccaccctggaagactgcctttgttccacaaaacacttccttcctcacacaattgcaagtgtctgaatcatctcatttttgaagtgtgtatttaatgtgatgattttccctcccaaagtgctttaattaaatgactgtagcattttataatcgatagagactttgaattgaggaaatacaagagtgagaaagagagcgtattcatgaataacaatgacattaaggaggaacgggatgggagccgcagttgttataggcagtaggcactgaggaaaatgattgatttgggaattaatgcaggccaacccttgtgtggcctgcctgactgtgccagccaagggctttcactgcctaacttctcttttctcctgtacatgggacaatcaaagccctgctgcccgctgtctgcctcactgttccattgtaattactgagatcgtatcttgatgcagccttgaaaactggaaggggctgtcgcctgctggtgatggctgccttctaatggcaggatggcccaatagtgggagcagtttgaaagtggagaggagcagggttgcttcttgtgttgaggggggcagccatgagctgtgtctggaaggtggcatgtttggaccgtggtgctgaagggggagatttccaggcagaggaggtggcctgactgaaggcagaggggttatggtgtgagtgatcagtggattcagcttaaccccactgagggtgcagggaggaattaggcaaggagggggttgagtcctatcatcagggccacaagcttgggaagtttcccagagaacatgggagctgcggaggacgtttgctcaggggagggacatgctggagttgtgctgtaaagtctgacagtgtggggtggatgggaggtggaggggagcctggaggcagagacttgctatggtgcagccaggggacagatgagcaagcagaggtgttggtgccgggcccactctggcctaccagcctcatacagggcaggcccagaggacctgtgtcacccaagcaagtggcattctcaggccccttgacccctttctgttctattcagatgccatcctcccacctccttcggcacgttgaataattaagaaaattattcctggtacattaagaggtctgccagcttgtgggagactcattctggttaaacaaatattcagctctcagaggagaaatctgaagcttgtgaacctgggcaaatttgaacagccgaacttcactggcagacacctctttaaggagcatctattctaaacgcttcatgttacaggtgggaaactgagtcacagaaaagcaaagagactcagcttggaggctgaagcccccacttctagtggctagcagtatatttccttgctcttctcttaggtgaaaagcatcaggagccaagctgtatctgaaagtgtctctttttctctttaacctaaaagcagagttttctgggtccaggttggcctggcacaggagaggacagggaactcaagaaaatgagtcactctatctgtgacgtaggtggtttgtgccctcacttttttgtgctttgatgaatccggagaactaagagatctttaattcctgaggagccaggcatgcatacttccagatatgtttcaaagtttcacttgtgatttttgtgtctttattctgatcaaattattcttgaaatttaataagctaaatgggatgattgtgtgaccaaaccaagccatctggaaatgtgtcaaaatctttcttaccttagcamgtgagatataaaggatcctgcaaagttcccctgtcattttccttctctgggagtttggagggtgaggaatcagatgggggctgctcagagtctggagacattcctaatagagtccctggctaagctttctgccctgttcctgctcatatccctcctagttggacaaagccaggtctagttaagcccagcctctcctgtggctttgtttctctctcctcttttctctaacctgcccactgggtagcttatttctacttccctcctactccctctccaaagcccctgcttctgtgacacctcttccaccaccccctagcctcctccacccccatgtattagagcatccctttacccgtctcctctcccaggaggctgtgagctcctggtggcagaattaccagtgacaggcagctgccagctgctcctgtcactctctgctgagagccccacagtgattcccaggaccgctccgtgagacaagcaccatgtccatgtccatcggcttgccactccggactctctgcagggccctctcaccatgcactcactcaacccctgagcccctgtccctgctttttcttggacacctgtgccatttgccagacactcactcacgctgcccggggtgcctgtccacttactgccagggtccatccttactcttcagtgtccaccactggcaccatatgtcctaagaagacctcccagacttctccaccctccccagtctgggccataagcctcctcttgccccacagccaccaccaccctgcccaatgactgtcccactgcatctgcttccttgctggccccctgctccccctgagctttgaagtccagggtgtggacagagggtgatcctgctccttgcatgtttaataatccagagacccactacacggaacatgccaagtagagcagtagccccagtggctttgcctggaggacaaatgactgacactgagtgtgctggtatctgtggagggaatgctggccaaggagtgtccacgttgtccaaggctaatgaacccttatccttgaggctcccagggatctgcttttctctggggcaacagtgcaaccacagagtcttgttttgggcctcccagcttgttgtgtgagctgcgggcagacagcaggtctggcttggatctcctatggctgagggtcagcaacaactatgcaagtccagccagggactccctgcaacactgcaggcttcagctagtaccatggcatattccaccaccactgaccactgcctgaagccaaccttgagtgctggaagagggaacctgggtttgaycttgattctgatgcttgtcagctgtttgatttcagatacattacttgttttctgagtctcgctttacccatctgtacagtgggaatagtaatgcctaccttacaggttttctaagagtagagaacattgatgtctctgttagtagatggtcacttttccatggcctttcttacctaagggaacactttcttacatttcagtggagaccgagccctgatcggctcccagtttggagaggctcaccacctttccacagggactggggcttcttgtaacctgtgctgtctccaactcaggtctttgtccccatcatgatagctcaaccatagccaaactgtaggggtccagccaggggaactgctccctggccatttttggcaatgtggaagtaggtacacataccgagatacagaaccagccccttccacaggacactgtgagttcctgtattccgttgctgttgcaaaaaccatagaggtgtgtgctgaccaggagcccagtgaggactggaatcagaaagaggaagttttgagagccatggaaggtttgctgacctgcctagttccttccaatgggagtctccatcttagtcttcaggggatcccctgaacttctggaaaacacctgcattgcctcagtctcctcgtgagtcctttgaagcaggtgtagggccctgggccctgccattctctgccagcaggcacactcagcccttggcccaggtaagaagtggggacactcgctgactggtgatgtctagggccgcaccgaggtgattgctggagttatcgtgagtccagcagctgcgcctgctcctggcactcccttgaggaggtgctggccatgcagggcccacagggaacctcctgagtggcccactccttgctctcccacctgctgtctgcaaggctgcccctgactccacctggccctgatgtggcattcccccaacacaggcttggtcttggaggcagccctcctgctcgtgtctccacattgtgtcctcgccagggccaaatcctcacatgcagcactgtctggccatgctcaggcccacatctctacggccctgtcctgacatccaacaaaccagctccttgtgaggagacccgagattggacagactcagcggccagcccagggggaggtgatgaaggcaaaaggaagggtctaggctgggactagggcagctgactcagaccttggggctgaaccccaaagatggatggaggccccagagcacacttacaaaggccatgtgggctgaagctcccaagggaagtgcagattttaagagcttcgaggcagcaaggtgcagaatgcagaagaggccatgcagtgcgcactctgtgggcatctagcatgtactggacaccctctcacatatgttggcttgcttaattctttctgcaatgttgcaaggacgatattgttcccattttacagctggagacattgaggttgagggagcctgagtcgctaaggttacaggttaggaagagatggagctgggatttgaatctgatctatgtgatgctgctctgggttggcctggccttggagctcaggaggggtcaggctggccagagggactaggttcagggtggtggtggtgcttaccagcgagtcaaggccagaggttgtcacacagcccaggctaacaggcccactcctagatacatggagctacttgaggtgggcctggaacactcaggtctcacccagctcacaggtaacttaggagctaatgtcagggctctggacaacaggccctgccatgaagcagtagagacctagcaggggctcccagctcccttcccgacctgctttgtgatgttctatgagccacccacatctctgggcatcacagagctctgggggtcttagcctcccgtgtcttcctggcccctggcctcacctggggacgtgttgcaatcaccttagaccttgtagccaacacttacacatggcgccactcagaagtaagtcacaatgttggggaacccggcctccaaggtgatctggtgagtggcctgggtgggcaatggctgctctgtttccaagctcaccaggcatctgatgtgcaggtgtgcatctaacaaagatgcacgtgtgactttttggagtcagatgcacatctcgttgggttatctccagggtcccgccttctttctgtttctaaggcaatccctctaaccagagtgatcatggccccatacctcctggctgttctttcttcttctctttcctgttccaggcttggtttactgccagccaggacaacctttctagaatggtgtttcctgggccattttcctgcttagtacttccagggtctccccattacccagaatgccaggtctaaccatgctggcctcccttttctggtcccacatgactttaggtggcatcttgtcccacggcccccatgtcaccttggcctgtttgctgcatgtctgcctccagcttgcttcctgcctggccttctctgagtagcccttccatccccacgggtgcgcctgtcctccatggccccatgcacatttgttctcctacggtcctgtgccccagctcttgagatggcctccgaggaggggatgcgttgtccattacagagcctctcctgtgacctgcttctcgacaggccatctcttggtgtctcccagcagcacattttttcagacgaggattggcactgtggagagtcacttctgagattccacagctcatggcatgaggagcaggagccggaatgcaggacttgatgccaggttccaattttgcctgcccacgatgtctgtcttctagcgtgggagattacaccaatctcctgcacatttgaagcactctgatgtcactctcctgttcccaagcgtgccagggcttgaagcttgtggctgtggcagtgacaaggcccctgtgacagtcctgttccagctttctagtgggtgggccttgcctgtgcagatcagaccaagatttccatgaaatgctctttctgagcagcagtggcctcccggaggaacagtgaggggcaagaggccttcaccccacttctggcatgacactgaagacctctttctcttgggggccctctgtcgaccgtatcatgctcagtctttgctcaatttattctcagtgggggagacggattgaaggtgtggggtttatccacaaccccaaatatggctcctgctttgcctcatgcttctaagaaggcaaagtttaacgctgtgcatgccaagtggtactggttcaataaacgctgatgggaaatgtggacaggtctggcgggtgaagggctttatccaggacagccatgctgtatccgccgaggctctccagagaaacagaacaataggatgtgtgcatgtgtgtaggcagagagacatttattttaaggtactggttcacagaattgtggcggctggcaagtttgaaatcttcagagtggactggagactcagggaagggttgccgtgagtccgaaatcagtccgctggcaactctggaggagatcagaggtctctcatgaaatgcactatagacctagccggcccgtgcagccccagaaagcacatgctacagggctcacagcccctgccacgtctccatttcctcctccacagacagccacgctcacctggtttttgccccagggggaggtgaggtctgggaggtgaggagagggaagtgggaggtggagggagcagaatgtctatggacagggctctcagggtgaccatggagaagagggtggggcctggccatagccactctgagacagcaggcagagaaggagatcacacactcagtgttcagagctttcagtgttggggcttgcagcatggggacttcggagccagcaggggcagaggcacagggacctattgtaacatccagtgtccctcctgtccccttcacaccccacacgcatacacaccagagctcctgctgtcagttaatacatcaccgatgtgggcaaggactttccccacagtggagagtggggagaggaggggctcctgttttggaggagctagacaacctcagagggagagtggtggagaggttttggaggcagacagatctggacctcagtgagttgcaggctcctgctcccagcctcagtttcctcatctgaaaatggtatccctaatgtccacgtcttggagtcatcatgcaggctgaaaatgcaaaagtgcagctggcctgccacacactaagctcccaacaaggctaaactccagctttgcctgagacactttagcctctcacactgtgctttttgtttttgtcctcttggtctactctctgggctgagaggtgagggtgaggggtgatcagggcttgcagtaatgctaggtaaaatctagatgataggattcttctgcttccaaagtccctctccaaggcttctcctcaggtggtggtcctccaggtgtggtccctgaaccagctgcctcctcacctcctgagaactcttcagaggtataaattcctgagacccaccccagacttactgacttgtaaactctggggctggggttcagaaatctggttttaacaatctgttcaggtgatgctgatgcatgctgaagttttagaaccactgcttttcagaacagtttctccaggagggcaggttttaggctgaaggttcacctcccagcaccaccccaaggctggccatcagcaggcgaatcatctcaaagggagtctcagagcactggtccttcaatcagctctttccccaagggcccacaggaaagcctggaggctgtcattccactgacatgagtcccctcacctacacttccctcctttgctttgtacgttatatagactgtgctttgggggccctttaccacatcctgcaggagctccaatgctcttgcccagtttctgcaaattctcagggtcttatgtcctccaagctacttctatctcctgatttctctgatcttgtcactgggtctcatctgtgtcccctttgtttacaatagtgttcctcccttcccggaactaacccaggtgtggaacacagagcttctgtaattggcgtcccataatccctccaatacaatgccatcatgtggcaaatgtttactgaagccttggcccagaagggaattctcactcctgagaacaccagctgcgtgagcacgcccagggatgctgcgcaaacgcaccatgcctccatctcatctccacctgggggtgggagtgtgtggggtcatgacagttcctgtgccatgggcttttgggagaattaaatcacgttaggtgggcacagcctttggcagggggcctagtgcggagctagcactcaatagatgctattatcgttatgattttatcgtggtcattaaactggatgaattattttctcttcctttatcttttatctatttattgattttatttatgaatttataattgtagtacataccacaatctataagtaacataacataagattcaccatcgtaaccatttttaaatgtatagttcagtggcattgagtatattcacgttgttgtacaaccatcagcactatccagctccattaccttttcatcttgcaaaactgaaactctgtgcccattaaaygctacctccccatgcacccctctccccagtctctgggaaccaccattctcctttctggctctatgaatttgactgctccagggacctcatatcaatggatcacacagcattcgtccttttgtgactggttagttcactttgtataattctctcagggttcatccatgtcgtagcatgtgccagaattgtcttccttttaaaggttgaataatattccatttcattgattacacattcatctatcattggacactggcttgtctccaccctctggccattgagaataatgctattaggaacatgggtgtacacgtgtctgcttgtgtccccactttcaattcttttgggtatacttttactttttgtaattgacctaccttgtctattagttcaaccagtttgatgtaacaatcaataataaacatagtatttttaattggatgcaaaagtggatgagaacttaaaggacagtctccccacttgaccaacgtggaggctgaggccaaggaagggccctgagtgagttcttatctgagggtggtttctgtggacaggagccttgacctgtccccagctggtggcatcttgaggaaagaggaagtgtggttaaggtggagcgtgtggactttggagtccgatgcacagaacttggctggtggccccgtgggaagctatggaaccactctgaggctctttccagcacctgtgaaatactactgtttaccacctcgtggggtgttgctgtggagataaagatagatgatacagagataaaaatgcagagctactataaagtgagctctcagggagggaagtcactactttgattaaatagagatttctatccccactgtacaggataaaagctgaagccaagggactaaaatccccacctctggcttttccattaattctctttccacctctgtacatgttttcttaaagtcaggtttactgaaatacaatttacataaaaataattttctttttttagtgcacactttggacaaatgtagactgtcatgtgaccaccaccaagtaactcctcctcctgaaagcttacttcatagtggctctgcattttcatctctgtatcatctctctttatcttcacagcaacacaccatgaggcagcaaatactagcagtatttgatggctgctgaaaagagcctcagagcagctccatagctcagaactgctactaaatagcaagttctgtgcagctgactccaaagcccacacactcctccttgaccactttcaagaaacaggacatttctatcccccgcaaaattccatcctgccttcgtagtcatccccttatcccccgtccctggcaaccactgatcttattttctctccttaacaattttgccttttccaaaatgtcctctaagtggaatatgacagtgggtagcctcttggggttggcttctgtcagctgacagaaggcctttgagatgcagccagggtgctgtgggtgttagccgtgtgttcctttgtactgtagagagggattctgctgtatggatggatgatggacctgagttcatttattcattcattctgtgaggggcatttatgttttttccaggttttggcagtgatgaacagagcttctagaaacattcatgtataggcttttgtaggagcataagttttcatttctctaggatgaatagctaggggtggaattcctgggggtatgtttaactttccccgaaactgccaaacttccttccaaagtggcagtgccacgtttgcattcccaccagcaagggtgagagtggtggttgctctgcacccttgccatcatcaagttttgattgcttgttgaagacatactaattggtgtgtcctggcatcttgttttaatcatcattttcctaatgatgatgctgttgtccgtactcagtatttctgacagtgtcagctgtgcaggtagatgtgaacgctgttcatagtacatcacctctgtctctctcctctttttaatttggttttagattgtaaggtctccttgttgatgtgaaaccatggggaagagggaagcaagcactagccccaccctgaacatgttttaggaacaagaatggctttgctatttatttatttatttattttggagcgctctagattgaggccaagactctgctgaaaacaggggcgagagtgtttggatcggctgacaagcagtgaggcactggcttttgcatggagaggaaaacagatcatttacggccatgcatgcgaagccactattctattttgtatcatctggtttagaggcttccccagctccaaggcctgagggccatggcccattatggagatggcaaacaggcagtttctgcacctggagtttataatctggaaatgagaatagttgcagaggctgacaagaaatggggaaagaattttaatctttaattttttcaaagcaactctttgtctgcaggccccagcttttctgcagaaggcactgagtcccaagctaaccctttgggtcattccacatgtcttcttgctctggggcagcttttcctgggaacagcttcttggcatcttagctccaagggcgctgctagatcacatctcacattctgagactcccaactccgcaaatcactcaatagaaagtcagggatgaaaacagtcatcaaaatgtttacttagcagcccaaatatcagcaacccagcagttgcttcatgctccagatgttacccttcattggggccgctgtgcgcagaatgcctggtgtgggttgttacaatgcagagcgagctctgatgatgctatgtatccctgcagggtgggtggggtgcagggtgagggtggatagtgacaccaagagacctgggggcatgcatggccactcccagcactggtgctgctgaggtcacagggaatccctccctcttgggtccctgcaggctcgccatctggttccctgcacatggcacagaggaaggggagaccccatcacatacacacaacccacagactctgggctcctgtgggggtccctgcagcccttcagcttctcactatgctggacctcttcccattgttcatgcaggaagggcagagagggactgggatcaccgggaccatgtggatgaggagaagccgagtctcagagaggggaagtgactcagttaagacaccacaggggccaagtttgacctggacccctgcctgtgactcccatcctggccccactgccccctctgcctcgtggctgtgtgagaaggcaagtttctgcctcaggagagcagagcttccaacctggctggtcagggatgtggagggccagaatgccatgtgccctgaacccatccaagctgggacacagcacggccggcagggaggagtggtcttgtcttttcctggaggctctgggactccctgcagcctcctggcctcttgctctgccaaggccatatttccctgaacccttcccctaaaagcccacctgtccaagaacctttccagggtagcaagtcttccccagcctgtgtgaccgggtatagtagtttgccaagcccctctccccatcctcagccccaagcagccacagtgtgagcccagctgcctgtgtgcactgctgggggtgtgctgggcagcaaagcctgggctgtccacagacctgggggcttctgctctggtcaccgactggcgaagggaccctggccaagtcacctctctgctcccacctcagtaccagctgtggacgaaggctgctagctttgctgtcactggatatcagaaggattacatgaagagatgcatgtaaatgcctgcactaagtaggtgccagtaaatatgcattcccttaatcctaatagtgacctgtgccaagctgactaatgctagaggggccctgtgagaggacctgttgtcatccccactttacaaatgaggaccatgaggcagggatgggtcttgccacttggtctaaacccactgtgttcaaaccccagcagtctggccccagagtctgtgctgggagccaaacatgtctgagagtagaatccccaggagccaaggtccagacgtggtgtctgtttaacaggttgatttttatgaaaaatgccctgagctcaagttcccacagtggagagtgaagttgggggatggttgggaagcacaggtttggatcctgtttttatttaaaattttgttcatcatggatttcttgacattaactttgatctctaaaactgttgcataaaattatcatttttggcacctccttaaatcttgtgaggaggtgagtgcctccttcattgccctaccctcaccctggcctcgcctgggactcccacagtgaccctaagccccgatgggtcccttttcaccctggataagaagaggctgctggcttgtaggtggggcacttcttgagaatgagacggatgagagtgtttttttcttgctgttcttcacatggcctgcaagcctactccctgtttccttctcttttcaaataaaactggagcaggtgtggcacgatcagcagatgagcaggaggtggggcagctgcagcttggcatttgagtcagatgctgctgccacgcaatttcaggggtccgcattagttagaaatccttgtttatcaaaaatctttgccgattcaagtgaaggtgagtcaagtgtttcacttcagcaaacgtggcttctgcacttcagaggagagctgggcggtttctgatcctttctctggatctccagctaagtccccacccatcgcagttccatattctgcctgatgctcacttgacttgccacttgctggtcctgaagatggggcatgttaacatgtcctcagacatggtttactgatagagccagttagtaaagcctgcaggtgtggccacagaatgaactttatatggtagagacaacactaagcttgctgttaccatggcttggggctggctctattggtgctagggatggcagtttggttggacacagtggctttcagagtcctggggaaatcctagtagaaatcttggagtgggaaaaatgaacttgttccaaagaggggtctaggcgagagagagagagattgagatttgggtgccatcagcacgtaggttaattcgttcacggattcatttatactttcattcgtttatgcaataacattttattgagaatctactctgtgccagcccctgctatggacataacatccttgccttcacagagctaatgtttagtggatatgtggctctcagtggtaattagagccatgagaatagctgagacctccttacaaagaacccatgaaatgagaactcactggagtctgactccagaacaccagctgcagggagctctgcaggagaccgagcctcagatggaaacatacttagctcctcactctgcagcaaatgcgcagtgagaaacaacagagatgcacttgcttttgattttattctacctgtcaaattatcagggttaaaaaaaagggtaataaaaaaagattacacatagggaagctcgagctcttgtacacttatgtagaaggaatgtctgtcccttgataggattggtgtttcaggagcagccgtttggaaatatggatcaagaggctggaaaatttatctatctttagatccaactatttccttttagaaattcaggaatggattaggatttgttattttatcatgaatatataaaaaagacttagacatgaggattgtcattacagtatttttttatagtactgaataattggatatcatttaagtgcctaagtgtaagggcttattaaataaacaagcaacattactctatggccaccatgcagccattaagaataaaggcattgaggatcttaagtgatgtggaaaatattcatgatgtgctgttttgactacaaagaaagttatggactaatttattaaaaaatggattgagagaagatatctgtaattttcaaaactaacaaaggaccagcttctagagtatactctcatgaagcagcaagagaaagacaagcaaggaaaaaataagcaaaggttatgagtagtgaattcacagaggagaaatgccaaaaggctaacaggcatgtaaagggatgctcatactcattagtaacttagagaaatgcaaattaaaatgacaatgcaaggtctctttccttcaatcagattgcaaacactggaaagctgggtgatgccaagcagggtggtaatgaggtcactgaagagccttcagatgctgtgggggagatggcctgatgcccgctttctggaggcatcttagtttgtggaacttagttgaactgagcagtcatactcccttgattcagttctgctgcccctgccttcatacccagagtcagtcatgaaagcccagtgaagggacccacgcagcaatgtccaccccagccctgtgtgctggactgaatgttgtggctaatccagccatctatcagagaaagccaacaagtaaaataggcatgtgatgcccactttggaacacaaggtagcagttagaggaaatgaacttgacaaacacagagacacgtggtggagtctgaagacataatgctgggtgaaagagtaagagcagaaaagatgcagaagagcatttgctaacttaagtgtatgtggatggaaatcaggtgctgtgtgtcatactctgtaagttccatgctggtggaatcatactcaccaagtgagagtgtgggtggggtggggacacagggaatgcgaatggagaatggaggtcctggtgataaagaaataaatgaacacagccagacaggagcccacccagatcagggaaaaggctaagggatgtgagcaactccacacactgcctgccccttagagttagccccccaaaagaaacaacttaatcccccacaaaaccccatcccagtgcccaacagaagcaaaagtataaataaagtttgcttcaacaatattatgatcgtgttcttactaaactatatattcatagatagaagctggaatgtcagcagtcatgttttctgggtatgggcaagcattatgttcttcctgattttttgtttcctcccagtttttgacaatgaactgacatggcttttgtaataagaaaattattcctgaaaataaagtcagagagtaagcagtctgtgtgctcgaagaggagctgggggaaggctgggttctgcacataaagagtgagaatgtttcagagagggctggttatccttgccggtgtcacgtggctaaaccccattctagccttcaaggaatgtgtgtttgggctaaaaataaagcatgatgtaacccaaccactgctgtagccaagaggaaaacactgggagcccacttctctatgtccctctggtcactactttgtgattgttgaatgcctgctgggcacccggatggcttcctacgtggtaatgttgagtttggtgagggcttttattcagggatcctgaacattttggtcccttctgagagtttactgaactgcagacaaacaaacaataaactatcctatgttatggtgtaagtcataattgactgacaacttttgaaggtgtgtacctttgggaggtcacttattggtgaattggcccttggctgttttcatcgcataagtttttgttcttgtgcctactggcttgaggttcccaacttgcaaacactgctcctgtgtgcacttagagatgagctcttgtaagcttggggacttaaagggtcattttgagaataaaatactctaaaaatatcaagtataaaccaaataatgcttagaatgaggaatctatccttacagacccatcatagaaggaagttctagatatagaattatgtgcctctacaaataccagtgaactatttacatctcttttatgtatgcagccttttaaaagagaagcagcaacaagtgaaaaaaaaacaaacaaacaacacccccccctcccaaacaggctttagtgtgaaagtttgcatttcaacttgacgtctagctgcctgtatgcctttggcccagtttccttacttacctagagagaataagagcacacatctgtctgtgtggctgtaggagagtctgtctgagtcttgtgtataagaccccacagtgctgggcacacactagattgtgaacttgtattaatcacatctaaatctgaatcccctttttaaaaaggcttccttattttagtctgtttcagattcttaggggaaccattttcaatagaaactgggctgagtgagtacagtaccttatccacagccagaatcatcaggaagtgatgtgacaggaatgttcacttctatttgttctgaattcagatctgctttgccacggcatggaggcagaagatctttcaaaggctgaagacagaaatgaagacccaggttccaaaaatgaagggcagcttgctgctgtgcagcctgatgtcccacatggagggcagtcctccagccccacagctctctgggacatgctggaaaggaagtttctggaataccagcagttgactcacaagagccccattgagcgtcagaagagcctgttgagtcttctccccctattcctaaaggttagtgttcttatttttgaaactgtaaggtgataggcgctctgggacacttctgggatgattgcatagtgaagttgatggttttaatgtcatcccaagtggactctgattggttgctcaggggagtgttgtcttagtctgctagggccactataacaaaatgccataaactgggtagcttagatgcaacagacttatttctcatagtttggagcctgggaagtccaacattaaggcacattaagtgtctggtaagagcttactttctggctcatagaaggtgccttcttgccatggccttatgtagtggaaggggtgaggggcctctctcaggcttcttttataagggcactaatcccattcataatggtagagccaaattgttttccaaaggccctacctcctgacaccattatcttagagattaaaatgtcactatatgaattttggggagaccctagcgagagtgtcatgccaaagatgacaagcaaggctcatttctagggtagggagggacttagaaaggacagacagttagcttctgagtaatactgtctctttagttaaaaaatattacattgttccatcacaaacccagtttgggagctagaaataagaccagcttctttgggagggaggagaagatggtatgtcctgacacaagagtcacacaggtggctggcaacctcacaccccagggatgccaacaccaaggcctggaaaagccagaatatcttgcatcaaattgtgacaataatgcaaagtgaggtaaaatcagtggaaagcaccagagcttcactcacatcccggtcacagctccacgaaggaaaccagcgcatctactgggtctgcactctagctagtggcagctggtgacagcttggctgcaagggatttcctttgttatctgggagcaatactcctgccagtgaggtctgccttatagttgaagtctagttgtagcattgaaagcactttttataaggacttagtgtttacttgactatggatttggggttatttttgaaaagcgtatacctacaaaatattcaaagcagagagaacaagagctacttttcacgtttgaaagtagactatggcagatggaggctttggcatgttttcactgctaaatgcctttgtgaatatatttcctctaacttattcatcagaaatatttaagggtttccaaagattacttagaatcttgttgggaacacgtttataggatgcattccatacttagcattaaacagttgccaagtaactcactgtccattaattcatcattttcctccatgttttggacttgtagtcccattcatctcatttcacagactgcataactagggctagattagtaaagatagctaaagattctcagccctagccctgcctgccctgacagccccagattctgggaggtgcgacagtcttaccccagttcccagatcaactttgccttatggaagggacaatgtgagcagtccccagcccccagtgcaagtcactggcaatggggatgagttcagccattactgagctgctagttctcggtgacacttttcccacctgcatgggcagcccgggctctgatgaaaggactgcacccaagagccaggacttgattcttcttcacctccctgatgtttatttgagagttcatttgtttgttgcaccaatatttattaagctcctatactctgctctaaggcctgaaatataggagtaaagaagacagaggtgacacaccaccctcatggtgagtgtggcccagagcagacggcatcgaatagcacactgtgtatttcatttggcctgcaggggttcagaatgaactagtggccattttttttcaaaatggaaagttttcatatgaaaatcagatttctaatttatcttgaaaattttggtagatctaatactgacggttgtatgggaggggttatggggttccccagctaacctcggagctcactccaacatctttcacccaacccatattactaatgaatgttatgtcaccgtacaggcatgtgagcttgtgactccatatttaagtgttactattataagtgaaccttgatactggtctttgttttccacaccctgtccctataattggaggcataatgaccctgttgttgaacatgtgggctttctagtcaaacagatcaaggctcaagtcctggctgcatcacttatttattagttgtgtgctgttgagcaagttaccaactattgctgaacctcagttatccataaagtagaattaatagcatttcaatgagaaaccatgagggtaagacaagacaatgattataaagtccacagctcatggaaagtagacattattcccattacttttccaccagcctccagtgtacttactgcacatggactgaagcctttgagattcctgtcgccaggattccctaaactgctgacacaatctgctactctggatccctggaacccacctctggcaaaccctgcagaggcagaatattataggcttctcataattttcttaatatctgtattattttattaagtcctacatgcctatgaaacatggtttctattacattctgacggactaataaaaccctgccagagccagagtgctcagccttcttaattaatagttggtggtggaaagaaaggtggggaagatgggagatttttctcaggtgtagtgcagatcaaatctaacctgagatgaagcatgagaacatttactggaatataggcccttgtgtaagaagataagcttgtaaccactctgttctgaattttataaccacaaagcagtgttctttaaggttttccatgaagttcccccttggaaataacagaacctaaaatgttatgccacttctcccggaatgtggctgttaacatcaaagccttatacatgtattggttgtcatggaaatcatactctgcctgggctctgagactcctgagtacaaacaaagagtcctgaactcccatgtgtgatggagctcaactctatacctgactcttcattttggcccaaagaaaattaattaagattatttggaatattctttgttccaaagcaatgcacacaagggattttgaattgtcacttctgctcggaaaggccatgtccctagggtgtggggtcttgtctgactgacccccagcctctttgtcggtcagactctgcatggaagcggtgatctatgttgtagttggggctgggtgaatcaggttgacagctgtgtgtgcctctcctaagttgctgtcacctggtagcttcaaacttgtgagtcttgagatttgacaatgggcattgtcttgtgcatcagactccctcagagctacttctttggcatcttcttcccagaaaagaacttcccgttagcctgtttggttttcttccatatctgactccttcaaacacgagcactgaactttcctctatccctgtctttgtttatacttgaatctgcagtaactgctaggcaagtacaaaggtgggcttggtttgtggtacagtgaatcccagccccactgcctcttgagttgaagagtggctgcaggggtgctaacccagtcaacattttggctattgtctaggtaataaggaagagcctaatgggatctcaacaaactggaacccaaaaagggagcttccctgaggggaggagtgagaaatgggattctcatccagaacagcaggctccctcctcacctagggttcctcactcctcttgttaggtcaaagagttcttagccagggcaaggtgaaggatgtttcagtcctgatctagggtcagatccttccaacctagcctctaccccttttcttttatttctttttaatatcaccctattctttctttgacctgtgctaagcaacctgtatattagaaatgagactaagagatgaaatgatgccctaggttccaatactagcaaggggcagagccaagacttaaactcaggcaccctgatgcccaggtgagcagttgctttcactgatgatagctaggtaatatcctacaggttctaactagctagccagacattctgttcagtgtttacatgtcctcacaataacgctgtgatgtaggtagtatttttatcccagctttataaatgaggaaagagaggcttagggatgttgcataacttggccaaagtcacccaattgtcagctggtagcagaatgtcaccagggcagtctgctgtaggtctgcattattaaccactggatgtccttgctcagtgctggggtttctaggataaagcaggtctggtttgtctttccttatttcatgactcactggacaatggctttgcctggctaagaccttgccttttccttgggctcaaaaagaatgtctcccccacacataggatgtttagattgctgactgtaggatgttgcagataaggaggaagttttatttcatcacatggaagcaacacagagccaatgacttctgtggtgtgcagagtagtgtttttaagaaagactcaataggctgttgttcttttcctgccaagagccttggggtttggtcttttcagaacctttcccatcgtatggtctcacaccaagggaagaaggtgttcttctagcaatcatgggaaggtgctggttttgggggaagaaaatcacttgaggtcctcattttgcacagagatatcctgtaataatagaaatggggaaatctagagctacagaagtagccaatgaggtttattcatagaatgtggactttgagagaaagcagaaagtaaaatagagaatcctcagcaattaatgcaaaatctatcagtgtctgagatagacaacttgggaggtgggaccacattggagaaaagggaaatatgtggatgtggtagattagaggtgctgtgaatgggctcacactcctcccttcaagaggtgggatctttatcccttccccttgaatctagatggatttgtatcaactgggctaatggaacaaggcagaagagacatttccaagcataggcctcaagaggctcacagcttcttctgcctctcacttggcatactcactcctagagtctagctgccatgttgtaaggaagcccaagtagttctgagtgaacacctgtgtggagaggatccaaggccctgaccttgaggctgcacttgctgctgactgccagcaccatcttgtcagccctgtgagcacacccacaatcttggaagtggatctcttagctcccattagctgccctagcagaatggagcacagaaaaggtgtccctgctgagccctgcccacattgcagatccatgagcaaaataaatgattgctattattttaagccactgaatttaggggtgttttgtcatgcacaacaggtaactggaaaagtgggtaacataagaaggaatacatccatttcctagtatgaagggattgaaatgaacactaacttagttgtatttagaggtgagtgtattttggtgtttgtgtgtgtgcatatgtgcacattcctaggctgactactaagccaatggtgcagagtttgtgatgttgagtatgattgatcattcttgtaaaaaccaagtgtggatctaactgatagttgaagaaagataaacaccattaaatacaatagcaaagatgaccaagaattatttttttattttttttattttttgagagggagtctcactctgtctcccaggtggagtgcagtggcccgatctcggctcactgcaagctccgcctcccagattcatgccattctcctgcctcagcctcctgagtagctgggactacaggcgccggccaccactcctggctaatttttcttttcttttcttttttttttttttgtatttttagtagagacggggtttcaccatgttagccaggatggtctcagtctcctgaccttgtgatccacctgcctcggcctcccaaagtgctgggtttacaggtgtgagccaccgcgcccggccaccaacaattatttttagatgtggtgtcctgaggggagagtaagggtaagccctcctctttgtccactcctgactctaccccatcttggagtgggacctgcaacatggtttattcccatcttcgggaaataacactttttagcaaagttttgatgcgccatttttttttcaacagaggagagggtctactgcatcacactcgcagggaaacttcatgcaaagtctcagaaatgttttgagctcacttaaagacaaacctgccaaactctgcagtaatggagtaataatgacattttgttcgtgctggaataccaaccatgttctctttgtcattcaaaagctgggtttttcctctcatctcccctagagcttagccattctttattttcctttggagaccagagcatcattttctttctctttcttccatgtgaagggacagccatgaggcacgatggtgcagcttagataatgttagcaaataaaagttttttaaaatattgagcaatattctcccagcatgtaagtcccagtttgggaaaaaattagggccttttggaagctgccttaactctttggggtccccatggtaccatttagtaratgattggctctgtgcatcaaacagcaccccggtggcctgaaagagttaacgcagcttccagaagtgcccatcgaggtcccaggaaggagtctgggccttgggagatctggctcagagtacaattactgttcagctcacagtggcccaatttgctttattgtggagtgcctcctggagtcccactgctccagagacgatatagatgcttctgagtcaaatgcctgcaaattggtctttgaggggtttgtcagtgcagggaggagttgcagggatttgttagaaatacatcgtagcagcgttctcatttctagggagggaaatcatctcgccacagaaattccaaggcaaaaggacagactttttctctccagggattaacatgtctgagtggcagttggcttgcaggtggcagctataagtttcgtagatgtgcgaatgctactttgggtatgtgcacgcatgtgtgaagtaattcaaaccttgactctgccacttaactgatttctcttaaactccggctaagcctcaatttctataaagtagacatagtaatagtacaaacctcaaaggcttgtggtgaggattagtggagctaatgtatggaagtgtaatgcatagtgtaagtgtttggcatggcactgaggcccaaaacatttagtcattgttactgtgtatcgtgggtttcatattcgtttcattcacttatcaagtatgtgttggaggtctgctatgtccaacagtgtttaacagtaatccaacattttggttgttttagcaaagttctaacccgctactttaaaaaaatttacataagcaaatgccaaccaagtctatttatatagtagaaaaaattcagatccatacaaaattttgttcaaaacacatgagtactcacaaaccagtatataataaataaaacatttcaggtaaaccaagctccctgtgtacacattctatagctcattcccctcccttttcctccaatggggttctctctcttgaatttggggtgcctcattccctgggtggatgttcacttctattagctacatataaggccatcagtaacatgcaatctagtcttacaggtttttatagactcatactgtaatatacttttacaacttgctttttccagtcaacgttctatttctgggattcatccatgttgatgcatctagctccatttgtttttcagtactatatagtatcctattatataaatataccacaaattattcattgtcttatcaaagcatattcagtaatttttccctcagtttttcacagccacaaatagtgccagacaaatatttcctgtccagtacatgtgccagcatttctttagggaatatacctagcaatgaaattgccaggtggtagagtgtgtgcccctgtaactttattggatcaggttaaacccttcttcaaagtgttcttccaaccgatactctgtcagtagcacatgggggttcctgtgattccccccattctcctacgtttggtattgtcaggtatttcatttttgccaacccaaaacatataaaatattgaggtttcaatgtgcactttatggatcattaataatttgttatttattttgtcttacataaatgatctttttttcagttgtctattttgttctttttctaaaaacargttgtttgcttttttctcgtctatttttaggagtctggatactaatcctctgtcagtggcacgcattgtgaatattttctcccaatttgtggcttgccttttcactttgtttatagaatcttttaataaagggaagatttttgaaggcttttatgttttaacaagcataatgctacagcaagacacacattaaaaatgtttttcctcttggattttgaagcccttcttatctttcctagatggaagagctcagcttaaaaaagaactcattcaggtctttgagcaggagcttaagcgaaagtggacggtgggtggtgctaggtggaagcggggcagcaaaactgccttccgtggaggccacggatgcccggaatgtgcacagcagctgaccttcctggtgggaactaggcacagggaatctctcaagaactcaagtcctggacctagggcagtccctccactctggccattggtctggaatgagcccttctcatcgcacgactaggaaacttagtcagtcctacttagccagttctacaacacagtagaacaaagagaaaaggccatctgctcaaagacttggatgaaaagcggacttacgaacagggctgctacagaaatagggagggaattctgaaataagtctggcattccaaacagaattttaaaactcatgacttctactaaatagtatcctaaataataaggggaaaagtctgcagaaaaaggtgatcaggtgggatagaaatacagaaggggcagataagaaagaattttaaggaaactgaaaaagagattaaaaacaacaactcggactggagaagaattttttaagcctggaactaaagccagaaaatgtaagaatagattgagaaatttgatttcataggaatttcagatttctgtttagcaaaaccaaacaataacaaattaaaagacaaaatgacaaactcaaaataactgccgttatattatggcctatctaacattttttatatacaaagagctcttttaaataaataatagtaaaatccctaataaagtaatagggtaagaatagaaacaggcaatcaagaaacatgaaaagaggttatccaccctaggaatcaaaaggctgccattgagatgagatattttttcgcttctgaagtttttcattaaggatgagagagcacagcgatgctcagtgttgccgagggtgtagagaaacctgtctgctcacgggaggcctggagagtctaatctgctcaactttgtctggaagctgagttagtaatatgtactaaagtgctagaaaataaaagcacactctttcacttgcaatcccactttttggaatttatctaaaggaaataatcaaatgactaaaactgggatatctgtacaggatttgaaatggtaaatgaggagaaacaggaggggctgggtgagggctgaggaagggagaaacctggagaggcactcctggtgctcctatgggggcagcaggcacctggcagggccatccaccgacgccagatgcagcaggctgtggggaaggcggtggactgggctctgtgtgtttgacatcttaggggctcgtgttcaggtggatgtctgagcagttagagaatctggaggcgttggtatagggatgatggttgaggctgtgagggtgggtgacgtggtggccttttgcatgcacctgggaaaggaagtcgagctgtcagcttgggctggtgaagggtggcatggcaggcagtgctcatgccctgcttgtggcattgctatctctgaccaagtcccatctgttgcttcaggcctgggaacactccgtggggatcatctgctttcccagtctccaaaggctggctgaagacgtgtctgaccagcttgcccagcaactccagaaggcccttgtggggaagcctgcgggtaagagcatggaggtgctggcagaccctctacagagagcagtgcagccctgcatgccctcccaggcctctcaggcccccctctgctttcgcgtggagctacagtgttgcctgccaaagagaagtaggccccactctgccactgagtgccttagggaccaagggaaatgcaggaggagggaagaggggtcggggagccctgctgttcctgggacacagacatagacaaacacacacactgcacataatacattatacacggacacacatagacacactacacacagatgctatacacacacagacactacacacagacattatacacagatacacatagacacacagagatacagagacacatacacatacactacacacacagacatacacactacacacagacacatacagagactactcacagaaactacacacagacacacactctacacatgcagacacacccagaacacactacacacagatatacacataggcacacacacacagacacactgcaacacagacacacacacagaacacacgggaccacggtctctgggaggaagtgctaggattgaagatgcacctgtgtgttcagtggagctcttggtcctgaaaagacacagaggccaaagtgcatctcttgtggggcctcctgacttgcattcttcccctcatgtgcgctggtccctggaggcagggcagaatttcacagtggctgagggccgagggtcaggaggaaattctgaggggaagaaattgctcagcatggtgtagatttcaggaattcttgcagcataagagactgtgtgatccaggaagtagggggagattctggattgtggggagtctgatagccgattagcttgttcttactcattggcaatcaggaaccactgatggttgctaaacggggacggtggcacaaaaaacgctgtcttccaaggagattagtctggcagggtgtggagcgtttggtagagatgcaggtggccttggggatgtgtaggcaagatgccaaagtcctctacagatgctcaggcacatctcctgggaagagggggccctggatggaggggaagctgagtgggcaggtcgctgtatgccctgctggtgacactttcttccagagcaagctcggttggcagctggacarttgctgtggtggaagggggacgtggatcaggatggctacttgctcctgaagtcagtgtacgtgctcacggggacagactcggtaagtttcagaccatcagcctctgccctgggcactgctcatctaggtgcagagggaggtccagcacagggtggtggcmtatcccaagagggtcattcgtttcataaaacaggtttattatttctcctccctcctccccttctggtgtagaacatggacttcagagtctgaaattcccaccttcccagttgacaagctgtgtgtaactgtggccagattgctttacctttctgccccttggttgcatttctaattttaggattggggataataatgcctctcttctggggttagtgtaggattgataacggctgatgtttattgactacttcctacctgtggggcaaggctgggtgtgtcccagacatcgtcagttaatcctcccaaggaccctatgagtcagatcttggtgatgccagtgagtgatgagaacgcaggcttacctacgctgtgcacctgcagtctatctgattctagaacccatgctctgagccactgttctttatttcttcctgttagagtcagcctgaacgacattccctgtaggtacctgtctcgccctcgcccagagatgagggctctcctctttcttcccttcccacccatacccaccgcatgccaggaacacagcagggaacctgggtggctgctgccctcagtgtaacttctccaaattcttccagcttctacctgctagccagttccaaagctgcttcactagatgaacccagacatgagatgggcatttgcagccgtgcttggaagggtgataggagcacatcacgcagcccttgtctggggccagggggtggtacatgacctgggaagttaactgaagggaggacctcctgacacttcttcaggtgaactgcctgcatcactgtcaggcacagcgacctgaagcacagcacgagggcgcatcacatgtgcccctgggggaaggactctctgcagtctaagtggtgacacwttaacctaagggcttgtttttcactgcctgtgcatggtgcatcgggggtgaggtgggggaaggacagggagagctgccctgaggaggtcaaggttaacaaggagtcaaatacatagaagacagtacattgcactgtaaacctttctggccaaggctaggaccagcagcctgcatctagtcctgatcctggcccagactgtacattcgtccttctctttctctgacttccccaacatgtctgtcaggttaaccagtggaatgggaagttgcatggacagcattccataggttgaccccaaaggtgttcacatgtgtgcatgcacacacacacgtgcacacacacatgcacacatgcatcatgcacacacacacacgtgcgtgcgcacacacgcacacacagagggtgcaggtgcagtaatcctggtggagctgcaggcaaagccccaggaagaaagaccccaggaagctcctggcaggctggtctccatctctgcagagttcctgtcctcttggcctctgtctggcagccctgagctgtttagttgagttgctggctgtctgattgtcagtcatcacctattgcactcttyggaccttgacgagatctgtctgggatctagatgagaggttggggaggggcctgatcaggtcctcaccattgttgctcacacacatattatcagcctcacctctggactgctttcccttcctaatcatgaggccctggaccacagtcacacagtatgatttgttaggaagcccttatgttctaatttctacagtccctccccttttccctcctttccaccctccctccctccctctctccctccctctctccctcccttccttccttccatctatgaatcttataaaggagctatagagcacatagtaagcactttatataaacttaatcttcacagccaccctaggtgcatcctctggttgtcagcatttcacacttgaggactggagcccagagggactgtcccatggcctcactgaaatggctgcaggggcctgatcctgggtctgggctgacctgcttctgctgccttgctgcctggggtcacgtgtgctcttctcttgcaggagacgctgggcagggttgctgagtctgggcttccagccctgctcctacagtgcctttacctcttctttgtctttcctctggacaaagatgagcttcttgagagtgatcttcaagttcaaaagatgttcgtgcaggtragttcaaggagggcctccaattccctgggtcaaaacctcacttcggggacagactctccaatgcttcccgtagatgcttttgtctttctcagccctggttcctgaactcctctgttctcccagagggtctaacctccccctcccctccccaccactgcacagtctgccccactagcaaaatagtagccaaaattttctaaatataagctttgtacccacccctgtgccatggcctcacatgggtcacctccaggattgctgtctgccatcacaggatgtaaatagtgttgtcatcctgggtccatacaaactgaggcatggtgagtgagcatggggtctggggtcatagaagtcttgggtggggctgggattggcacccttgagtaaacttgagtttacatgttctcggtgcctcttccttcctctcagaagacatctcaggcctctaagcatcaaatgcaatttccttctgtcattccccatctttcctcttctctttgactgactaacttctcacctccttcccctgcccacttccgggcagtttctgctttctcaccttctgagactctgagctctctagataacccttcctgctccctgagcttgcaggggacggtatggaggatcgtgtggcccgggaggatacagaggactgtggggcccgtcgctgtgtgtccagtgtctgcagtgtctcacacagagcaggtgcctgtgactgttcagtgaattcccaaatgcagctgtccatggtacacacatgtccacattggcatccacattagacgaattcccaagcccattcctcatttccagagggtagtgcatgagttctggcaggttccattaacagtgggttaccctctgagctgcatttgtggaaatgtaggtgtcatctgcttgtatgtaaatcatattctaattggaggccaggacgctgcaccaggcactttcacaaatgtttactgtgtggcttttaggtgccctgaagggaagtagtgcagggtctgtcttcgaggtcttctgggtatgtggacagaatgtgtgccacagggaatagaccattcctgcattgctcaagggtttctgttacttcatttcacaaaaatatacagagcccctactgtgcgcagctctatggcagacagatggttgctgcagcaagcatagggcttcactttgagaggtgacagaaggatgaagaagtcaaacaaggggaaaacaatccaggaataagtgtgttgttagcaattaaaaaaatagagatggggcttttctctgttgcccaggctggagtgcagtagttagcaattttttaagtgctatgtaggtaaagccaaaggtatactgggcaatgatggtgacaggcttttatttgtatgagagaaatcagtggagtctattctgagggcatggcatttaaccagagagctgagggttgtcagggtctgaggaggtagtgtggccgggtggggtggaggaagtggagaggagcagagaaatggcaatgcaagcccagggacaggtgagmccttggtcacatggccacagctacctgcaagggaggcagggaaatgggacctacagctgtggtccatgaagcccagcttctctctgtatcagactagaaggggaaaatgtcttcccatggaagtagcttgtgatatttgtcacactggcagcaggtcctgttggacccccaagagcccaggggggagctgcagtggataaagtgagtgagaaggcagtgctagtccatgcaggatgctatgggccatgctacggtggtgggattttatcccaagtggagagggaggttttgcaagtccctctgttagccatcaggaaaggggattggcgggaacaaggaacacagttaggaggctttatgctgactcttgtggtctcatggagaagtagagtctgagtgtcaacaaggaattctgaaacacttccctttttaaatagcacaaggttctgttaattctataccttaattgtgggtgacattttctggtattcccattaaaaagacacaaattcaattacttctttattattctgatttggaagggataacaattacttgtatagggttaatgcggtcagaattgagccccaggccctgccaccctttcctagggggctctgttgaccctgctggtctgggacagagggtgaccccattcaatcctgtccttctcacagagacatgctcatcagtgctccagagaagtagggaacaaatccatctgaggaaggagacttcctaaccaggtctccttgactgtttatcttcttatttttcagatgttgctcaatatttgcagtgactctcagggcctggagggactcctcycaggaagtgagctgcagtctctgctgattgccacgacctgccttcgggagcacagctgctgcttctggaaggaacccaccttctgcgtgctaagggcaatctccaaggcccagaacctcagcatcatccagtacctgcagggtatggcccgggaaattagatgtgggctgtgggccatgcaagggcttcccttgaactcagagcaaaggctgagggcccactttctacaatgagacttgggatgctcttgcagcctcttatagaattttgggaccaaagaagagatgaatgagcagccatgtccggtagataattctacatggcttggctcccttcatgtaagtgcttttcttgttcattttgctgctccattggagaaagcagggaaagaggatctcactatgcacacactaccaatcagacactgtgctgggcccctttgtacattatcttgcttgtttctttgagatagctattaatgccattttagaatggggaaaataaacattaagactagtagaagaatttttcaaggctattcacctagttaggaagagaatgcactttcaaacttaaagatgcctgattccggcaccctcatttatacactgggaactatgtgtaggggttaaggccaaagactctggagccagacagccaggactggactccagctctgtcctcrtagctgagtgatctcaggcacttaaccattggggtgcctcagttctctcatccgtaaagtggggataataatgctgctgatcttattggattgttgtgattctttgcggctcttctgagtccttgcagctgagaggctgagcttgcattatctcaagctctcataggtactttctctgatccactggattggcttccccagcactcagaagaggcttctcttgatgagagatttctaaaaacagtgacccatccaaatgcaaatctgaggacctctctcttcagactcaaatcttcccctggctccgcaccactctggtggggtagccagtaagccccatggcctgtcccctaggaatgggccacaccctccttcctctctgtgggccacacttcagtgttccaatcccctggcttcttcagtatccaaagcaccccatctttttaccctctgcctcctcacatgttcatacatcctcccctgcatttttcatcaaggtaatttctgctcagctccagcattgcctccttaaggtctgagatgagctcaggtcttgcattttacatctcactacctaatggacctggactcccccttcttgctgagaattagggacagagggctgaggggctgccttcctctcctgtgtcacctgctgggcttgcagagtgcagctgtcaggatggcactttctctggggtggtcttcctgatccaagagccagcagaacatgttttggattaattcccattcatgtcttgacatgttgtttggagtaggggaggtaggtggaccatggcaggaaagctcttgcttccaagctcagcaggtctctcctgtgcttccctcctgcagccacagactgtgtcaggctctccctccagaacctctccaggctcacggacactctccctgcccctgaagtgagcgaggctgtaagcctgatcttgggattcgtgaaggactcctaccccgtctcctcggctctgttcctggagtttgagaattcagagggctatcctctgctgctcaaagtgttacttcggtaagtggctgtgtttggtacggggagagcacaggaccaccaaagccttagtcctcagaatcattggggtgctttgcagaaaaatagatatagctccatagaacatggccagagagacctcttatttgcaaaagtgattcattgtgcagacaggcatggggaccacttccttagagaatcagtagttttacaaagtktacttgtaggcacctgtcacctgcatgcctgctggcctgattttccccggtcagaacccaaacagaagccctgtctgttggagggcttctggcactgctgtaagctgccctgcctgtgtgcttggagggctggaaaggtctggaaatgaaccaccttcaggagcagctgcccaccaatgactgaaggtgccaatgggtgcacatccagcacagctgcccttgggtgggcttgctctgcatggcctccagagctccccagaaggattagctccagtggccccatgaggcgcttgcttgctaatgctcttggactggtttccttcccttccctgtctcacgtggcctctcccctactggtgttttctgggatcaactcccaagtgaactacctctttctcaaatccttgaaacatgggaaacccaagctcagacaccgttcagcagggcctgggctggctccttgccttccactctgccttcctgtatcatcttcgagtggggcccagggattacagasagcaagggatggaaatcaaagaaatgccttgatggcccaagctcctctgctgatcttggggaagctgctatagggcaaggccacatactttcccttgggctttgctgggcgagaatgagacaccctcctcctctgaggggtatatctactaccgcacttcacacacttcactacagagccaggctttgagcctacatgcggtgacttggacaagggggccaaagtcctttggtccaccaagtgtccagaaggatgtgattaaatggcaataccctagtgccttcctccaaagggacgctaagtgtaaatgcccctctgggcacatcacattttgcattggtctgggctgtgaccagctgactatgatccccacggaggtctgtgtcatagcatttcctgaacaaatttttggttcattgggtgttgagttttccccagaattcttgtggaaggcaggagaggggacagaaacctattccagggagtgccaagaaggtcccacgtgggctcattggctttcctttttgccttaactgaagtcacgctgcaagaacttttcctctggaaatggcagggctggaataagacttgagatgcccttctccacaagaggagcaggacagcctacctgcccataattaaaatacaaaagccacactcaacctttaaataagcacaaggaagtccgactatttcccacaccattttgttgcaatgttgaactattatattacatctctcctttgggaggtgccctgatctgctgatgccctaaccacatgtcttttggaggttcagtcatggaaagtgacttcctgtgagcagatggcatagcttttcacaggttacaaatgcacttctttggatctaagactgacatctgcagagtggtgtttatccagggcgctcccttgcctctgaattgcctcaggtgcagacctgtggggtcttccccagcttgcagatccccattggctctgtctccttgagagcaccatgcacgcatgtggctgctccatctaggaagtacagggagctggcctcatctgttcccccaggtatgatgggctgacccagagcgaagtggacccgcatctggaggagctccttgggctggtggtgtggctgacaacctgtgggaggtcagagctgaaggtgtttgacagcatcacttaccctcagcttgaaggcttcaagttccatcatgaggcatctggtgagtctttcctgtgtctgggtgaccggaagagtcagtgctgagccctgagaaggctacagagggtcttctcctgattctttgtgtacctttcaatggtgcagtaggctctgattctgtcacaacctttggggaggttatgaatatctcccatgggacttagtggaaacattgcttaataaaggcaaagactctctcaaataacggaggcagcctctacttctctccctcacccctggggtgatttactctgcaacatttgcttatataatggggactgatggccctaaaacagccatccaggttcagagtcagtgacttctcagtactttgagacattgattgattgatgaactcaatcagcaggcatggatactttctgtgtggcaggcactctgccccatgctgggtgccagygtgaacaggccagttgtctgctccctaaaattcctctgtagagactgtcacatgtccttgaaccctagtctgctggagaatcggctaagaaatgcatcaggcacagccatgacccagctcagtcaggaaacctcgaacagagggcctgccggagggagtttttaaggctaagtgtgggttgtctaggttgagatgaagggagaaagtttaaaggcagaaatgacagtctggggaataaatggtggcctggaaggctgggtgagtctgggaagtgagagcttctgcagaatagaggcagggaggctgcagtgctgcagagttcaggttaagaagggccattggatgggatgcagtaacacatggggcacagacatggtttaggggagtgcctgaatcagacaggagtttcacaaacatctctgttatctgaggcagagaaggctggaggcagggagctttctgacaaagtgtcycctgggggagagagaatgaggcttaaccttcaagctggaggaaaaggtaggggtgggtcaggaaagtgtaattatttatcagcttgtctagaaacaaaactgattttgctagtaatctccaacatcatttgattttaatccgctgaaaccaatcctcctagcccaatgctctccaatggaaatacaatgcaatgcacgttatatcattttaaatgtaaattttaactttaaataagaagaaacaagttaaattatttttgataatatattttatttaactcaatatatcccaaatattaccatctcaatgtatggccaatacaaataattgtcaacaagatattttgcatcatttcytttgtattatctttttgaaatctaatgtgtatttgatgttcatggcacatgtcagttcagagtggccacagtttgagtgcatcttggaccatgctgcactagccttcttcataccccaggtggctggcttttctggacttctgatggacatgtgcccataggagttagaacacagaaacttcaaatggcatgcccwcttagtartgaaaacatctatttgtagacacaggcaggagaaatgacttgtaagatcattcwtgttttcctcctcaggggtgactgttaagaatcttcaggccttccaggtcctacagaatgttttccacaaagccagtgactctgtcctctgcatacaagtcttgtcagtcatcaggaccatgtgggcctggaatgctcgaaacttcttcctgctggagtggaccctgcagcccatctcgcagtttgtagagatcatgcmcctgaagccggccccagtgcaggaacacttcttccagcttctagaggccctggtgttcgagctgcactacgtgcctcatgagatcctgcgaaaggtacagcatctgatcaaggagagccctgggccatcctgcaccctcatggccctgcagagcatcctcagcatcgctggtggggaccccctcttcaccgacatcttccgggactcagggctcctgggcctgctactggcacagcttcggaagcaagccaagatcatgaggaagtcaggtgccactgggtgcattgggagggatgggcaggggtcagtgtcagccaggcctgacctttgggccaatctggctgcccatcaaatgcaacagaaagtgagcatgcccatgtcactgggaaggtatgcttgggacacacagtttcacaaaagacaggcagccacccagtcttcccaatgaagaagtgaaagggatgggtgaacctggggctaactcaggccttgtgaattcccaggttttagatatctcttgtcctagacattgtgtgggtgtatagacagggagactgcaggggtctgacagctcctcaggaatgggagctcagagaggcctgaggtttgggggccctcctggggtctgctgggatatggcttcctagctcactctgttcactttgcactgttggctcagtggtctcccactgggagagagctccttggggtcttgcgggcccagcacgcccctccaagtcttggtgccctgctgggctgcatacctgtggctccttggcaacattcccttgmccctacttggcccctgcaccctggagtctcaatcccaatagcctctgctgtcccctgaggctttagggtctcatgagggtgcttggtggctcaggggttgggctcttgcactgcctcaccatgctccccagcacatatcctgctggagtcactctatgtggtggtctttaactaccatctccgttgactttctgataggaagcaamgtgtggaaactccttccccagctcctctggtctttccctcagtctgtctacacctgctgctctgggaaatcagcctggaagagggacaccaggacacaagaatctggatgcttactctgcccaccttccctcctttcattctccttctcccactgcactggctggaagggtcagggagctctctagcctttggctgcttctgtaattctgcttcagacttaagccaaggtcaccagtctgtctgtttcctgggcctctctgagggaaaggagctaagggctggaatcctggccatgctactgacaaactgagtgatcttgagaaagtgacttaacccgtacgagccgtgtcttcctcggtaaaacagggtaatgatgttgacatcattggaatgttgtgagattttaacgagggaatctctgaagaggacccactgctgtgcctggtacataacaggggctcaagaaacatcagtcgccttgtccctatagttccagtgctactgccatagactgagacagacacccagggaggagctcaggcgtcttatggaggccaggatggacccagctcctccctgggagtgtttgcaaataggatcaggactgcgaaggatgagcccaagggatggtttttgtgtctgggcctctgggccaagccctggacaatattttatgagttgctttctactgcttagtaacttctgtccttaaatcccatcttgaatgaarttaatgtattgcttcatccgctttccttggtgtttaaatgagaagtctttgcaccgtctctttgtttggtggttctgtcttatcttagctggtatttcttttcagcagcctaacattgaatttgcttttaaatgcaattccagacccatgaccactcctaggagaaattaaacttttttgtgagctcatgcatctagtcttacttcatactttctattgttaaatgtgtcttgttgtttcttagatactctgtctcctggtttataaactctattttcattcattcattcattcattcattccccaaataagtattgagcttccaatttgtgtcaggcactttgctggcatggggattcaaggtgaataaagagatctgattttgccctcatgggtctactgggatcacctatttactccaggttctcttgagcttccccatgactcaggaatgagcaggcagtcatccctcccaaggatgcatggcaaactgtaaaagtggccaaaggaaaattaagaaggcagggctctgtgtatcatctggggcaatgcttctcaaagagcagtccctggaccagccccatcagcattgcttgggaacttctcagaaatgcaaattatagaaccccatccaagaactactacctcagaaattctggggatgggacccagcatggggctccgggttttaacaaaataagccctgcagggaatgctgatgtgctcaaaatggagaacccctgctgtaggggtaacagccttctatcttactaattgggatacacactcccttatgatgaaagcattatattcacatctccttaagaggatagaaagctggagtcagagatttgcggtcataccacatgtacttaatttattttgttatttcttcttcaatatggcaggaaacaaagtgtccactcctggtgttcaggatccagaaagagaactcacctgtgtgatgctgaggattgtagtcacacttctgaaaggctcggtgaggaatgcaggtaaggatggtgccaagtttgcctcatcactgcttggtaaaacatgaactctttcctggttatttatggcagtgttcacaggttatactcaaggagtaaccaatacacagcgttagctgtggctaatgatcctctcttggccgatgttcagtgatcatcagtaaattcgtagatactatacctctgttgacacttttcacttctaaggttgctaaataaagttggtgacaaaaagactatgctcaatctagcattttctaaatttatgagaaaaatttattagtgtcctgctgcactgactgtagatgctttttaatttttttttagatccaaarartaacatacgggcaaagaaatctagccattttaaagaaatgcaatttgttgtgctctcatcagacatgatgcacttagcaatgtaatccattcaaattttcttttagcgtcctaagatcatgtggcttctgggttttaaaaataatatgtgcatatatatatatatatatawaatgacatagacacaccaacatcatatcagtgggtttggtgatttaggcatctttatctgaggccttcacagagtaactatacctaatgtaaaaaattatttcattatggcagagagagagtctttaacatttagtctgcaaaaggttccccggaggtgctggctaaatgcatattcctaggctcacagccagacctttaattaatggtcagtcaaggtggagctcaggaatctactttttttttttttttgaggcagagtctcactctgtcaccaggctggagtgcagtggcatgatcttggctcactgtaccctccaccctcagggttcaggcaatttacctgcctcaacctcccgagtagctgggactacaggcgcacgccgccatgcacggctaattttttttttttttttttttttggkattttagtagagacggggctttaccatgttgaccaggctggtctcaaactcctgagctcaggcgatctgcctgcctcagtctcccaatgtgctaggattacaggcgtgagccaccacgcctggccaggaatctacttttaaacatgctttcaaggtgatttccatgtcagaggtacctagcccataattggaaaaatcctgtctgctcaaatctccatcaagccatttgaaggatccagttgcctcctagtttttattccacatggattactccaatatcaatcctggggaaaaaatgcttggaattacttttaaacaaaaatatatcacctgtcaggtttctttaattttctccccaaggaactatctagaaattaaatatattcttagcttaaattgtggtttgctttctatatgaattttgtcagagagaagacagaaaattgtcattggctctggggaagaaattatggggaaatcaagggagaggtagatctagttaaagcttttattacttaggtttctatttttttttctttttttaccccaggaattcatgacactattattaactttagtcaccatgttgtacaatagatctcttaaacttatttctcctttcttgaatgtatctcctatggggagatgttagtcattttttttttcaaaaataagattctcattggagaagaaagcagttttttaaaaaaatcatcagatccacagtttcttttttctgcttctcactttaacagtgggtatgggttaccaaaaaatctaccagtgagcaaaagagaaacaaaaaatagcaaaatgaagtttgaaaattataagacaaagcttttcttttgattgaaactgaagtggcaagcttcccccttgccctagccccattctgtctgtctgatccttagttgtcctgaaggaccacggcatggtgcccttcatcaagatcttcctggatgacgagtgctaccgggaggcctcgctcagcatcttggagcagctctcagccatcaacgccgaggagtacatgagcatcattgtgggtgctctatgctcatccactcaaggggagctgcagctgaaactggatctcctgaaggtgatttcaagtcctcctttgagattggcttccctgtggatatgcaccaagcgatccacatttgctcaggcatttgtattcatgtaattcagttagccactgtatgtggcaggcagtaccctgtattaggtagygtcaggtgctgtaacaaataaatcccatatcctcagtagcctggtacatttgaaatttctttgcawcatacagtccagtcaatgattggtgactgtcattaaggaactaccatcacctgggcatctaacttggccagcagacaagggaagagagaccatggggaactgcataaggcattttcattcaggcctagaactggcacgggttattttctgtccaattttctttaggaagaactttgggcaggactcacctggatgcaagggatgctaggaaatgttttycctggctaggcagctacttcccacaacactgtaaactatggaagtgcagctcaaatcagcaatggccaagtagctgccttgttgatctgatgagcatttattgagcatctaacccattaccagggctgatgaagagtacctggggcttatagtcaattgtgatacaacccttgccctctgggagctcatagcctgtttctaataagtaagcaatagttacattgcagtgtggtggrtgcattggttagacactgagggcaggttgctatgggaacacagaagtaggagagaccaatgctgccttacctggttgaggaaggcccactggggagagaacctgtgagctgtgaaaaagaagcaaaaggcagtcagaggtgtggaaacasggggcacaaagggacaagtgaggcagggttatcatgtttgggcaacagagatataagtgtatgtgtttgtaatattgttaacattcatcaatttatcttaaaatagttaaatacatataacaaatatcattcttgccatctcttctgccttacaactttcacagttttgttgctgttccttttttacatagcttttgtctttgtgagtttatgacttttaaaaaggattgcttgagtgatcctcccacctcaggctcctaagtagctagaactatagacatgtgccaccacgcttggctaatttttgtattctttgtacacagggggtcttgttatgttatctagtctggtcttcaacttctgacctcaagcagttctcccacctcagcctcccaaagtgctaggatcataggtgtgggccaccgtgcctggccaacacgctcatgtttcattaacatgatatatttgattgttggtgaattaaaaaaaaaagtgaagttgctctgatttccaaaattaggtcaatcatcaacctaacttacttaagcctatctctatgcaaaacctttttaacatttagagaatggtgtttgtttcatcatacttactttatttctctgcacattcgatgtcagacattgatgtgagctgttccagttattatgtggcctaarccagcagtgattggtgtggccaaagcattgcgtggtccatccaaaagtggcgtcatgaccataatcatcatgtttcacagatgacaagaacccagccagtgatttaattgcagggccatagaatcagtggaagtgatttgtacgaaacaaaaaaaggaaagttaaataccttttgaaagacacttgaatcccatgattacttgaggtaagggaagtgagagggatgggtgaagcagagagtagggtaagggagagatatatcaaaaataaagaaaataccagagctaggaattaccttagattcatgtggtccaatctcttaatgttaaaggcagagagacatccagagagcttcattgactaaattaatattgcataactgctaaatggtgaagttgagtttgaatctaaggtgagcaactgaaaactgagagttcactccacttcactgcgctgtttggtacattttccttcatatgtccatgttcagcgtgactggcatgttctggcaggataggaacagggaaggcatgtcctaaccagtcaggcttgtgattttctattgggtgaataattgttcctgacagtaccatatcaaaagccaaacagatccacagagaggaaagttttgcttttactttgcttgaagagtaaaagtatttttgtgtccartgtagaaaagagtgatctgctttgctcatagaaagttccttttgtttactckgtagcccagaggcatcgtattggagtgtcagcccttgggcaataggactaaatgtctagaattagtaatgtaaagtcgttatggtgttttacagattcaatatcatttcagaatcacagttatcaagagagcacataagggaagaacactggtgagcttatttaatgaagtcatagcctgcactcaatgtgctatcttctccctgggtgccaagtcactgctgggcagttggagggcccaggagctggcattgttttccaagggctagggctgtcacactgctgctctagggggcacttgggaggaatggaacctcttccagactcgcccaccactgagtcacatgagcaagtggtgaaggtttgctggaatcagatgtgagatctacatttgtttctaagtcatcatgggaaccccctgaaactttggaacgaagatgctaagtgaattgcttctcactggatctctctctttagaaggtgagagccaactctgcccatagggactgtttctacaaagtgtgtctgagtgggatgagagggtgccccttcttataaaggtttcccatctccgaagggcattcacagcatgccatcactctgcatcccttccctgtggtctgtctgccagccactctggagaagcaacttagggcagttatttcaaacaccagtggcacttccataccaacactgaagaacatgtgacttcaccacctaattctggcaaatgataactgagttaaagaataatgtaagcaaatgaatttcctctccttggccggtgggactgtgattgggttatgcacaaattcagattgatttgctaatatacatttagctgttcaactctgagcttaattgcattacctcaccggtmttccaccatgacacatggaaaattwtgaggaataacaaataatagaatgtgaaataaatcctgttagtcctaacgtagttagcgctttacagcagacatccattttatagattcaagctggaggaatactaactcagagacgatgacttggtaactgagttaggatgagaaaatgtgcttaacgctgacctttcttgaaatgtgtcaaccccagcctgattactttgacttcagctgattaaatttactcccctccgcagactgaaaaccctatgtgatgcattatcatgcaaagttgaatgacagtaatggagaccctcctcctagactccccgttcctgacaaatcatttcccgaagtagagaagtatttattttcctttatgatagaaatgtttctctttagttgctatgaaattaagcctttgtaattggattttggactctttactttatgactctgcaaatatgaaattaaccccatcccaagaaataatagaggagtctaagttctaatgagattacccccattttagataatgactctgaatttaataaatcaaacaaagcaacaattaaggacagccattccttcctcctctccctcccaagaggaggaaaagaaaataaccatctaggaattataggtgacaaacccactgagagacacagatcataatgagggtgattattgggttgctttgctttttaaaatatctgcttcaacactctttgagtgatggagttcttttaagcaatattcagcatcaaattggacaactgaattgggagggggttccttgggggaagagggrtttatagtggtcacccagcactcaggcgattgtctgtaatctgatcagttttgttttttaatcattctcccttcctgatgtttgttttgtcgtgtgttatgtgactaacagaagcgcttattcattccatttgccttaaacaaagctcctagaggtcttagagccattgaaagcactcacataaatttagtctgtttaacattgtagagcttaagatttcctttgtgackgattgacttttcatggcatgtgtcacgtgaccaggcataggtcaggttcagacgcgtgccrtaccacatcgcagtgaacagcctttggtatggtttatcagttagaaaggagggaccaaaaccaccacacacacgtcaaggttggagtgagtttccaactcaaccataaaaataacatttttttggaagtgagttgctcacataaggcaggcacagatgcagcatagctgccttagcctttcctgaccctggggcctccaggatggggcagggacaggcagctgctgtgactctgtctacacagggaaaggccttgcccaacttaagccatgagctttcacttatgcacactgagtaccaccatcctggaggaacctactccaacaatccacatgctttgctttgagggtgtgtctacaaatgtccaactttcctgggttttcggccaaattcagaaagaattaggccacatcctcactcgggaggagaaagcagtatcattgcccccatctttcaggtggcctgggaagtcaatttccctgaagtctttcccacgattcacacttgactgccccctttagtgggtggccytgatgctgggtttctttcaaagagcaaaacgacaattcaattccctgcagtgtccctctgagaagtggtgaggtatcacagatctaaccactgtgagtagtgtgttttctttttctataactgggaaaagatcaattggcctgtattggtaaggatgaatctttctacctcactttatgttatttgtctattttgaatataattatggactttggtctttcatagattctcctagtaactgcaatctgttttgttttttaaatttctggaaatgtcatagatggggccctggaagccctttatgcatatccttggctgctgtttctcttcatctttgaaagaatcctcgcctgtgtgcactaagagagttcaggctcctcctgtgttctctgacctggaatgtgagactgactactcgcccagcagctcaggtttcctgtagtggaatataacattagagaataaaatcccagtggttggaacacacattctattgtttcaaataaacaccactgttaggttagggtgccagcatttaagagatggagctggatactcaggaagctgaggcaggagaatcacttgaactggggaggcagaggttacattgagccaagatctcgccactacactccagcctgggtgacagagcaagactccgtctcaaaaaaaaaaaaaaaaaaaaaaaatggagctcccaaagtgcatgacttcatgtttgacagtgacctgtaactttactaagtttctattaactaaaaagaatttaaatatctagacccttcccacatrtttttctgagctaccagttttctctttttcactaacttccacgtatcatactacagactgttgcttarrccatgcatttaagtcacagcatcacccctcccccagatagggagtgtctattttattttttctctgtgaaccttgtctcaggcctcctgaaactgactccacactgtgccttctcagacaatccccttccctgtcacactagagcattaaatacctgaaaagataaaacaattcacacctctctccrcagtctactaaggaacccacaaggttgtccactctctaggaaacacacatcaaatgcctgagttttagatggagtccaatgcaatttatctgatcaataaataagtactaaaaattacagacttttaatacttatttaaaatcgtccctgtgtttttcacatttcgatgaagyacagtatgagaactgcttaaatgtagccccccctccctctctctcttcctccctccttccttccaatagcatgtaytgattacctagagtatataccatgcactgggcccaagtaagtaagtgctcaagaaaggtttgattttagaaggaaataaaagcttggctggccagtacagctctcagtgatctggagggtggtggattccacgatgtatcctatcagtggcctaattgctttctgcacacttggcctatgctatgtgttatacctatgcatttcattccattgcaggtttctcttctctttctgacacactcttttcacaccacattttaagttgattcattttactgtttcccctcatctaatataaccgatgaagccgtgcttgcacagagagggagataaggaataacaagctgcttctatgaggatttcactgtgtgtctcctgtacagtataagagatggttcatcccactcatttagcaaattgtcattaagtgtgtgctgtgttccacagtagtaaggaagccagatatggtttccatctcgtggagcttcagtctggtggagagctgagacggttttcaagtagctgcagtagagtatgacgagagttttgatcagggaatgagagggggatgtgtgagcactcgacctgggatgagtatgagctacaggacagaagctttctggaaggatatgcattcatgtcaaaaaacaggacagttaaatcaaccgtatagattagtgtagtaggcacacatggaaaacctaaaccgtaagaggaacaatatggagatcccaatgtttcagagtgatccttcctgtaacttgttggcctgaagtcgttgagggaagagctagtgggacgctctggcaggaatgtgtgtgggctcagggttaatctacctcctggagtgcactcattttgatttgcttggtgtttcagtctctgctccggatcctggtgacccccaagggtcgtgctgccttcagagtctccagcgggttcaacgggctgctgtctctgctctctgacctggaaggctccctccaggagcccccgctgcaggcatggggagcagtatcccccagacagaccctggagctggttttgtacactctctgtgctgtgtccgcagcgctgcactgggaccctgtcaatggctacttcttcaggaggaatgggctctttgagaagctggccgaggacctctgcctgctgggctgttttggagccctggaggaagagggcaacctgctgcgctcttgggtggacacaaaggccaggccatttgcagatttgctgggcactgccttttcctccagcggctcactcccaccccggatacagagctgcctccagatccttggctttctggacagcatggccagcggcaccctccacttgcgtggggacctgaaggagtccctgaggaccaagcaggggccggttgtggatgttcagaagggagaaactggcagtgacccccaacgcaacttcaagcagtggccagacctggaggagaggtagcttcttctgccagtgtgtcatcagtgcatctctgtctcccattctcactctaacgtcttgcgcatgtgtactcagtaggaaggctcagctacagaatgggtgtgcagaaatgtcatgtgacctcaacttcctcaaatcaagttagctctgactccacactcttctaccttgggagctgatggaaaattcaatctgagtcagtactgggttggaggatgctgtcgagtcacataagaaccagggagggcaggaccctgctgctacactcaccttctcctttgggatctttactgtcctagggagccctggtgcctgggcctggcatccctgggtgtgccaggcagcctcggtcttctcaggttttatctcctccccaggatgctgccaggggtggggtgagatcctttgatctgcaggacacaaaccacagtgtccaccccaattatggaactctttctgttctttcttgctgcttctacaccccctaacaaagacaattgctctccttacttccgcaggccaaacacctcaatgagttcagactttagtaaacaactttttcctctcatgtctgtaacaaagaattccactaaagcaagagagcacaaagaaccatccctaccccaacccacttggggtgggagggaaaatgaaagaacacaacagtaacagttggtgtctttttccattcctctaaagcataaatgacagaacacccattaatactgcagtaagttatccttctgaaagacactgcatttttatccagagtgccccgtttgccagacttcagtgttggggatggtagagagaaggatgcatgttaaatctccacacattgagataattatgatttttgggggttaatctggcaaattaattggtttcctaatcttgcattcctgcgcaaaccaactcattcataatctgtgtattgctgaatttgatgtactaatgtttaaaaaggatttttgcactgatattcaggaggttggcctttcatactcctttcctggctatttttcttgtcagatttatgctagcatcatagcatgagttggacagtgcttctcttctatgctactgaagagtttatgtagattgtttatttccgttccctagctaatgtgacagaacttgcctctaaatgcttgtgaacccgatgttttcttgtgagaaaatttattctcatgagaatgcacttctgtttgttcttgaattattcttggtttgttattttgcaagctgattttcccatttcatcgaagtttccatttgtgggcatccgactgctcacgatggctccctcacgctcttctgagcagaacttgtgagttctgtgactcatttctaacctgtttacctgtgtcttccttgctttttctgcttcagcactattcacaattgtttacttttcagtgtgccctatgaaccaactttgacttttcctgtttctcctactgtttttggttatcatttccttctacctttgggcttattctggtgttctttttcttaacttggatgtctgtttccatcttctttttacatgtaaatttctctgtaatttgtaagttttattttcagtatcatttagtatgaaatatttttctaatttcccttataaattatagttgactcttatgtgtttgaattttgaatttccattgttacagtgtttctagtcatctttgctatttacttctcactctatcaaggtgagagaaggtggatcgtctgggttcttatcctttgaaattggttgaggttgacttcatggccctcaatgtagtcccttctcataaatattccacatgtgcttggaaataatgcatgttctcagagtgttaggttcgatgttctatttatgtcccttggatcgaatttgtcaattgtttcattcaaatatcctttatcattaatttttaaagtcggcttgaaatatcagctttttgttttttatttttggaataaacaggccttattgggctcatgggtcttgagggcctctgtgtatttgtcagttttcttctccacgttctttttggcctgtttctgcagccttatgagctatttcttcttctggtagtgggtctcggccttctccttcctcttctcctccagggtggctgtcactgcctggtacttccagccagcctcttgagccaggcgccccacgtaggcaaactctcttgtgggcttcagatgcacagccttgcgggcagcagaaacacccatctagttttcctgctgtaggkcggtgggattccatcgaacacctcggcgtccaaggcagcctggcctcgctgggccttgcggaccgcgggccctgcactgtcggctggaagacgctgctgggggccaggaaataacaggggcctcatcagggttggtgctcatccgcctgcggaagaaggccgggtacttcagcttatttctgtagaaattgtcagaaacgttgacactctcgcagcgcaccaccaccttccggcccagcagtacctgcttcaccacaacggccgccaggtggcccaggaggtagcctcggtctccagcactgggacctgcccctccgctacctgcggcagcggcctgggaaatggtgtatcagttattgagaacgatgcattcaaaatctctcatgataaagtggatgtgtcaatttctgatgaattttcccttacatatatttgaggttgtaagaatcatacatatttagaatttttatattcttatggagtctaaatttttatcattatatggtgaactttttatccctagttgtacattttgccttaataataataggactatatcaggtttcttttggttagttcgtgcctgggatttttcttcatcctttggttttaacctttctgtgtactstccttacatttttaggtgtttttcttgtaaacaataaggaaccacttttgttggttttactttgtttttcaatctagtgtggtattatttctcatttaactggagaaagtcatttgtttacgctttcataattattaatatatttggaatgatttctacttagctttttacatttgttccactttaaaaaaaaacatttttggtcttatttttgaattgattttwaaaaattgtgtttcctacctactagtatgaaatttaaactctctatgattaattttatagtagttgccctagagtgaattaacaggcatactcatgtttttagttaaacagtatctttatccttccaattaagacaccaagaccttaaaactcaaatatttttgcccttttctaactcatacattactattagctaatattttaaacttatctcctgttagtaaatccatcagatatgacagttattgttgttgttttataaaatattctttggatttacctacatgctttcaatgtctgtgctcaccattcttttttgcatctctatccttccatctgggattattttttatctactctagtacatctgttaaactttcctgtagtgtgggtctatttgtggtaaactctcttggattttatttgtctgaaaactgtctttattttctccctaattgcagaaatatagttttgctgggtaaacatttattggttgacagttattttctcacagtaaatggaaggtctccccagctattgccttccattgttgccttttaaaatcgtttttatttctcttcctttgaaggtaatttgtcatttttctctggtcgcttttaagatcttcaccattcttgttctattgctttactgtcatatatctcaatgtacattattttaaacatttattttgcttcatattcattgggattcctgaatcccaactgatgtcttttataaaatatggatttttaaattatgacctcttctccatcccttttcctattatgcctttttggaactaacacaattagatgtatgttttactttttcattctatcctcccttaatctttcttttacatttttcatctctttgtctctctgtactctgttccacacagtttcttttggtctttcttaaacccactgaatctcctactagctgtgtctaatctgatatataatctagccatttaggttttctttttaaaatttcaatgacagtattttatatgtctagatatactgtttctttttcaaataaacttgatttgatagcccttttcctttctcatatctttcatttttatttcttcaaacacaagaatcrtaattatttcttcttgtgttttttgagagtatattgtttctgtgacaatcatggaaggtcccttgtatgatgtctgattttttattgtgaatcttgctccaagattttccttttcttggattccatagaaaccatcctcattcaggccattctgcccttctgtaggtatgggaatgcctccatggggtcttagctgccctttccaagccaggccttggccagattcccaggtcctgattttcttgcttgtcttgggaagaattccctctctgggttccctgttctctatatttcaggggcaatmcctgaggaggccttttgcctgggcaccctgataacatacaggttaacttaggatcttggtgtggaaacttgtttgacttattctgccagctctcaggggcaggggagtatttgtcagtatgaaaagacatttagtaagtgatatcaggtgaagaaaagcaatagtaattagttgaatgtctatggaggctgagcactaaacatctatttatttttatttccctccaaaattttggaattttatcaataaggaaacaaaggctgagaaaggataaaaaacatggccaaaggtcacacatttagtaaataataaagctagaatttgaacccagggctacctccaaagcctgcatgcatttgtctgtgcgtgcgtgtatgtgcacacayrtgtgtgtgttcttcctgtttttttcctgatactcccacaataatagtgatagttttccaaatgtctgacacgacagcctgcagtttgaagattgggttctaaccaatggactgcgtcagtcctgatgttttagaggtgagtcctgtgtcaaatgtcatcctggttttgtaatgagtaatttttacatttataagacccatgtttcataaatagagcatttttttttctccctaaaagagatacatggcccttgaccttccttgatggttagagaataggaagtgaaactctaccccctccagggagtctgcagagtaaagggcatggcagtgggctgggaatgggagacagggtgctcgtctctgccgtaccacacttgtatgtccttgggcaagtggcttccctcagccctgccttctgcaaagtaggtcccaagtctccagggaggagggaaagaggccgtgggccttggagtcaggcctgcttgttctatgccttggtggctgtgttctttggtcctgctactttatttctctaatcttccatctcctgatttgaaggcagacataataatagtatctacattgagggaagatggtagttagagtgatcacagctgcttcctaagcatgtgtgcgccagacaccatgctcagctttttacaatggactattcttcaattcatttagtctttatggtaactataatttaaggaatatttttcataacacagaggtgacatgttatgtaattccaaaaatatatctatggtgtccaaaatacatcatatatctctatgaaacatgcaccataccaaataaacacccctacaccaaacacactatatacacatcacatgcacatatacatacaccacatgtacacaaaacacacacacaccacactaaacatacaccttacacatactggcataccayacacccacacactgcacttacacaccacacagcacctagcacatacacatgaatacacaccacacataccacctacatatgctacatacagacaccacacgacacacacaaataccacacatacacacatactacatatccacactacatacacacaccatagaatggagtgcttacccctcagcagcacatcatccacagtgcaggtctggaggtgaaagtggagcagaagcagggtcagactgtggtgggccttgcacaaaccctatgggagaccatttcacttttaccctataggcaatgtggagctagggtggtctctgtgcaggactrtggcatcatggggttatgggttatgaggactgctctacaactgggtctgtgtatagctctgagaaaagccccctccaaagcaaggcagccctgctccttcttgcttctgccttagcatatgccttctcccagcccctgccaggcctcgtgggctgacgtttattccttatgtcagccaaaggagcaaccccagtcacctttaccttgaacttaagttgtggctataacttatagccctaaggggacatcatttcaacaggaatgcggtgtgctccaggcaatagttaaggtttcatggggcactctgcaggccagagccctaaacacttactcctctggctctgctgctgggcatcctgcagcttcatcctaatctttcctgttgaaacaatgtcccctgtgggtatgagttatatctgtcacttaagtttgttagaggtaattgttgtgccagaccattgaggaagggtgggggacagtgtagttcctgaacagttcacatgaaggccacactggcctttggaaggcacagatgtgaccctgtcgttcccacttggaagcctccagtgctttcccatgattcccaggagggagtcaggcattgggagtgtggggcacacagttctgggggtcctgcctgcccatggcatgcagccatgcagccatgtttcagactcagatttcacatatgccctttactctacctgggatgcctttcctgtcttcactctgcctggacagttgcttcttatgcttttgtctaggtttagatgtcacttcttccaagaagcctcccctggcctgcccatccccatcccatgggccaaatcagatcccactgcctcacatttcctcagcaccctcagcactgatcacagtgcaaatcaatgattaattgtgtaatcttccttggtttcttatttctttggttygtgtttgcacacttgagcatatctgaaaccaggatatgtattaaaatggatgccaaggacatcagccacttaagtcgtctcttccccatctgctaataaaggcactgtacatctatcaatttttggtttcttaccactgttgaaataagatggtgttcaaatctctttcttctgcttcagtggtgaggcccatgtgagcatggactgggtctgcagctacatcagggacccctgtgaatggtcactgagtagaatatgggcatgaatgaattgagaagatggacaggacaggaggaaaggcagggagggttggcaaggcagatagtcttggactctcgtgcctggtgtcctgaagacacctgatgtgcagttgtcctgcaactgcttcagatatggctgctcctgcctgctcctcttctgggctcccacctagtagagacatgaatggagcattatccttgtatggtggggaccctggcaagggcaggcccagaaattgagaggacgcagagaagtgcacctaatgaagtctggggaggaggtcagcgaggcgttcctggatgaggagaccactgagctaaacatttaaagatgagagttatctggtctgagatgggttgaggaggcataaaggtgagactcaaaatcaactatcttgagtaaggtttgttcctgccttctgtaggcattgctcggactttaagctgtagtagggctttaagctatagggatggatgggcagagatgatggctggaaaggagaggagcaaaggagctgtcagttgctccttccagggatggcagtagcttgaacaggagaacattttgagaactatttaggacgtaactttgcctggccttggtaaccaatttgatgagagtgtgagagagactggttggtgctagtccctgagagagaagccctagagktttggaagaggatggtggctgtctggagtaatcagcatggactgcacaaatgaggcygctttgcttttaattttctaatgcatccctcaagtatccacaggccttagtaacaggagatagttattaatcttgcctcctgaagtttgatagagtccacatagggggcagtctgtctgacttccatatctaagcaagacaagtaccaggattggagtagtcatcctctctgtcatgcagctgctgtgggtggcaggattttatagccaagctcaggggctgtgtgaaatgatgaggcttcactggttcacgtcctgcaaaggcccctaggcttcttcaaatgagatgcaaaatttggccaagcacgcctcacaccaccactggctcccaaagatacaggcactttgggatttgtacttttgattacaactttctgtcgtacccacaggtcccttgcgagatacaagccgtctgggaacaccaggtcaggtgggggatcagtgtctgccatccttgggatccagaaccttgtctccattcctgctctgtcaatccctaccttacagcaatgcttctcatagtgtggcctgtagaccacctgcatcagaatccattgtaaagttgcacaaaaatatagttgtgtaaactagatttcccgaatcrcaaatccctggggttgaaatttagggttctgtttttaaaaaggtcctcttattatgtgtaagcacattaaagtttgagaactgctccaggtgctggacatcttttactttaaaaaaatcttagcttttttcactgaggtgagatttgcagaacataaaattaataatcttaaagcaaacaattccatagaatttaatgcattcacagtgttgtgcaaagaccacctctatctaattcaaaacacttttatcaccccaaaaggaaaacctatactcattctcattcttttccccagtccctgggctaccaccaatctgctttggggattaaactgttcaggataaatcatgtgtaaatggaatcatgtaataggtttcctttggcgtttgacttctttcaggtagcttaatatttttgagattcatttacattgtaacgtatatcagtacttctttcctttttacaataaaataatattccatcatatgggtacacaccacagtttgtttatccattcatttgttgatgaacatttgggttatttcctttggttcttgtaaatagtgctgctatgaacattcatgttcatgtatttatttgagtacttgttttgaattcttttgaatatatacctaggagtagaattgtagctcaattcaatagaattgtaggaactgtaaaactgcctattttcacagcagctgaaccaattttacacacccaacagcaatataaaaggttttcaatttctccacaggcttgccaatatttatttccctttaaaaaattttttagccattctaatgggyatggagtgttatctcattgtgattttgatttttgtttctctaatggctaataatgttgaatttttttatgtgctttttggccatttgtatatctttttgggggaaacgtctattcaagggcttggcccatattttaattggkttgtttctctttttgttgctaagttgtatgaattctttatatattgtgggtactagactctcaaaagaaatatgatttgcaaatattttctctcattctgtasgttctcctttcattttcttaataatgtcctttgatgcacaaaaattttcagttttgatgaagtccagtttatccattttttcttctrttacttgtgcttttggcattatatgtaaaaatccattgccaaatccaaggtcataaagatttaccactgtgttttctcctaaaaattttgttttggctcttattgtagatarttaattcattttgagttaatttttgcatatggcaaggggtcagggttcaacttcattcttttgcttatagctattcaactgctctggtaccattagttgaagagtcccttcttaaattgtctttgtatccttgttgaaaatcaaggggccacagatacatgagtttatttgtggattctcaatcctatttcattgatctctatatttatccttatgtcagctccactgttttgattatgtagctttgtagtaggttttgaactctggaaatgtgagttgtccaactttatcttttaaaatattgctttggcttcttagggtttcctacaattccacatgaatttgagggtcagctgtcaccatttggcatgctgctagctgtgggcttttcataaatgccctttatcatgttgaggaagtttactatctatttctagtttttggagtgtttttatcatgaaagagtgtgagattttgtcaaatgctctttatgagtcaaatcagatgatcatctgttttttgcctttgtctattaatgtggtgtattttgttgattggttttgttatgttgaaccacccttgcatttctaatataaatcatacttggtcatgrcatataatccttttaatatgctgttgaatttagtttgctagcattttgtttaggattttgcatgtatgttcataagggacattgatcccttggatattggtaggtttttttttttttttctgtattgtctttgtgtggcttcagtatcagagtaaaaatacaggcttccttgctgttcctggaatatgccagacatactcctacttcagggcttttgcaatggctcttctctttgcttgaaatgcttttcccatggatgtctgcatcccgtctttcagttttgcccttcttaaagaggccaaacctgccattcaaattaaarttgtaaattactctccttctgcatacaagcacttatcaatcaaaaatcaaatttttgtcarttctcctttcttggctctttttttctcaatagcacttatcatttcttattcattatgatattattatgttatatattaatatgttatattatacacaataattattaattttaatttacttatttattgtgtttatctttatgtctacacccttcccctcacacccaggtcatggattttagtttgtttagtttacagatgtatccagagtgcctgaatagtgcctggaaaataataaaaggtcaataagtatttgctcagttgatttgaataaattacgcccaagcacaagaaacactcctgagcaccttagctactctgaggactaaaaacaatctcactttgcatatgacagcagcaacatgggcagggtgttggaaaactgggtgttggtaatttgggattagcctgtagtttattattattatttcaattcacatgaagtaaaagtctctttttttggcctacagttctatgggttttaattcatgtgtagagtcacacgactaccacyacaatcaagaaacaraacagtctcatcacctcaaatagctcccagatattgccccacatagtraaaccttttctccaccctatcctcgcaaccgtggatctttccttatagttttgtctttccagaataccatatacatggaagcatacatgtgtaatcttttgagcctggcttctttcgctcagcataaggcctttcagattcactcattttgtgtgtatcagtagttcatacatttctgttgctgagtagttttccattgtagggatgcaaatgtttcctcccagcctatagcttatctattcatctttaaatagggtcttccacagattgaaggttttaaattttgatgaagtccaaatcatcatttgtttttacttttatgtattgcacttttatgtcatatctaasatctctttgcctgacggccatgaagattttctcctatgttttcttctaaaagttttacaggtctgtaatctgttttgagctactttttgtaccatgtgtgaagtttagattgagattcattttttgtttgtttgtttttgcttatgaatgtccaattcttccaatgccattagttgaaaatattatctttttttccattgaattgtctttataactttgtaaaaactgcttagccatatttatatatgtctttggacactatttgatttcattgacttatgtgtctagcttttcaccaatattgtcttgattactgtggctttgtaagatatcaaatgcaagctctccaaagatattcttccttctcaaatttgctttggtgatttcagttcctttacctttggctgtcctgatggaacctcgttattttatatataggtaggtattgtttgctgattgttgaggatttttgcacctatgttcattagggatactgacatgcagtttttttatactgtgtttttctgttttcaatatcagggtaattctgactttgtaaaatgaattgggaagtgttcctttctgataccatataaatgttaatgatcagcttgcctatatctacaaaaattcctgctgggatttttattggaattgcattagatctatagatcaatttggagagaattgacaatttaactatagtaaatcttccaacccataaacatagtgtgcttttctgtttatttaggtctttgattctttcatcaaagtctgtcatattcagtgtagggcctgcacatgttttcttagatttataccagagtcttttgttgaacacacttccaaagggtatttaaaattttttggtttctaatttttcaattctagtatttaggaatatggttaacttttgtatgtcgactattattctgagactgctaaatttaattattagttctagaagtttttttttttatggattccttgggattttctatgaagacaatctcatcgtctgtgactagtgccagtttttggtcttcctttccaatccatatgttccagtattacatccaatagcaatggagagatccttgcttgttcttaatcttagggagaaagtcttcagtctttgccaytgaatataacatcagctatgggaatttgtagatgcccattgttaggttataaacaattcctttgaatttactgagaatttctttttatcatgagcagatttttaatctttcaaatgctttttatgcattaaatgatattatcatgtgattttattaatatggatcatgttgactgatttttgaatattaaacttgccttgcatttacgggtagtccaattggccatagtaccctcgttattttatatgtagctaggtattatttgctgattgttgaggatttttgcacctatgttcattaggtatactgaaatgtagtttttttatactgtgtttttctgttttcaatatcagggtaattctggctttataaaatgaattgggaagtgttcccttctcttgtgtttttgaaagaagctgtgtagaactggtgttatttctcttttaaatgtatggtagaatttgctggtgaaaacactgagcctcaaggtttctttgtgggcaggtttttagctacatattcggtttttgtaatagctataaatgatttaggcaacttatttcttcttgttgagtttggtagtttgtggcttcgaagaaaaccgtttgaaggtagtttatgactttgaaggaacaattactgagaggagtgttgaactctctaactataattgtggatttggccatttgtcctttcagatctatgagtttttctttctgaattgtgatgctctgttgtaaagtgcaaacacgttttgaattgttatgtctcttttaatcatcatatcatataatctgtttattatgagtcattttccttgctctaaagtctgttttccctgatatgagtagaattacaccagctttcttttgattactgttaggatggtataaatttttctatcctgttacttttaacctatctatatcacaatatttaatgatggcatatagctttgtttttatttctttccattctgacaatagtgtctatcagtttttaatgtgtttgaattattgatgtgtttgaatttaggttcaggattttattgtttgttttctctttttttttactctttttttgttcctctacttctgtttgcctgcctttttgtggacaatttgaatatattttagtattcaatttgagtttatctactgaattttttgactctccttttttgtctctcctttttttttagtgctttcaatagggactgcagtatacttaattaacttttaacagtctacttagaattgacattttactatttcaaatggattatagaaagcttacctctacgccgttccctctatccttccctatttttgttgtggttgtcttatgtattacatctaatacaatgtcactttcaaccatcatacctaaatttaagaacttaagaagagaacaataatagtgtattatatttacccaaatatttaccatttctgttgctctttcttcatccctgaagtttcctttcattattttgttattattttcctaccatctgaagaaattttaaaagtattattcttagaacaagtctgatggcaagaatctgtcttccttcatctgggaacacatttattttgccttcattctggaagcatgtggatatggaattctgtgtgtatttttgtagcactttaaaaatgttgtttccatgacttctgctttcttatgagaaaatccaaggttattcaaattgtcgttcccttaaatgtaatgtgttgtttttctctggctgctttcaagatttttaaaattttctttagtgttcagcagtttgattgtgctgtgtctgggcataattttttttgtttattttatttgggttttgctaagcttcttgaatctttaaggttatgtatttcaccagctttgaagaaagaagtactaaaaacttctcaaacgttttttctttcataccatactctttctcgtctccttggaggattctaatgacagaaatgttagatcctttgttacacatgaccttgagtctgtctttatttttagtaatctttttcctttttgttgttcagattaggcaacttgtattgctccatcttcgtgttcatggactctcctctcatctcattctcctattgttctcatttagtgagtttaaacaaatttcagttgttgtgtttacttgattcttttttattgcttctatttatttactgaaactttctgtttttcatttatttgaaaaatgttcactcttacttcttggaattgggttaataactgctttaagggtttcgtctgatagttccaacatctgtgacatctcagcattggcatttgttggttgtctttttccacatgagatgttgagacttccctggttcattctatgttgagcaatttcaggttgtattctggacattttgaatcttatcttatgaactctggtctttgttgtcatcttatagagaatgttaatgaatatatatatatatatcttaaggtagggaactagcccacttaggttcaggttgcaagtttctgcccatcttccctggactctctggttccagtatcagttcagttttcaaagactgcagggagatttgatgtgcgctcacttgcttcatgcagtaactggttgtgtgtggtggtttacctcctagttagggtcagatgcacatacacagtcagaactcagcccagaggttaatatacaactttgtggttacattttcctcagcttcctcttcttcatcctttccttaacacttgctggctcccaaggggtcccttcctgctctgtctagaattggcgcttttgtttctctgttcttccctgtgtcactggtatctgtctctggggccatgcagtgaggggagaaaaggagaaaagagcaatgggaattttacctacactcttgggactacaggtcctctggtcagagagaaagtttctcttcactgagagttttagagtctgcctggctgctgctgctgttgctgatgctgagggaattgcctgaaagatgggttgggaaagaatggggaaaccaaacaaagaaaatcccaggggatttcctccatgctctgtgacctgtaaaacctcctttcctgctcctcagaccagaaacagaggacttctcttggagctctttccatcatgtctacaccttgtgcacagttgcgagttttaggctacctgtgagttcacaccaggggatgctgcagaggggaagcccagaaagctcactgccagttcatagtgcttgagtttggtttccttctcggctaccatttactttccagagtcctccaagagctgctccatgagttctaagtgttttagttgcattcggtattcagggggtgggacagagctgagtgtgcttacaccattttgaagggacccagaagcctgtgtgtgtgtgtgtgtgagtgagtgtgtgtgtgtgttcaatatgaaaccagagcttctcaatctccaacgtatctggagggaagggaagaaaaccagggaactaacttcactgagcatcaactatgggtcaggcactgtgccttggagcacaaaagcattcttctatgactgtagggggaaagtgtggtactgtcaatgccttttagagttggaggaaattaggctcgatggagtagttcaatgtcatctaggtaataagacaggatgtgtaccatgatctgtcttagaaagaaagatccaggaagctcagtgaaaatagaaagaaactggaaggtccgtgtctcatgtctggctctccctctctctgcaggatggatgagggagatgctgcaatcatgcatcccggggtcgtgtgcatcatggtgaggctgctgcctcggttgtaccatgaagatcacccacaggtacctggtgttgaatatgtgtgttttgtcatcttcacatgactgatctctcaaatgccttctgacccaagacagcttttttccttttgtccgtgtcttcagtgccctgcgttagcagagctccccatgggaaacacctatagtgggaaagtaccagggtgtyctggacacttgactgagttgtgcccacccttgcaaggccatccaaaacagatcacttctgttaacaaagctaccttctaagaacaacagccaaacaaaaaaacaactgaaaataattgaaccatagtaaggcaagtcccaggtgttaagctcagcacctggcgttggtgggaagtcctttgctccctggcatgttcatctctctcctggatgctggctgagatcctggccctgtgctctgtgcagctcatgcacagctagcaagatgagcatagacactgtccacagagcccgcctctatgatggggatgaggaggtagtgacagtgcagacagactaaataaatgagctcacaagtgaatatgaaattatgaattgtgacgagtgatattacagggaaaaatcagggtgctgaggtagaagaatgagaatggaggcaggaacagatctcattaaatctaatttagataaagggttggaggtcarggaagccgtctctagatggtgacatgtaagcagagacctgaagggtgagtagctagtgtgaactgggtgggaaggggcctgctgttggtggctaggggaggagcaaattggaagggccaggagcaagggctccctggtcaggcgatgatggggataatggggcatgcaggcttctgggagccttgccaatgtaaatgataacaagaagcctctctcacgtgagtggagggtgacatgatcagattttgcgtgaaaaacattacattggctgcttggtggagaawggacagggaawgagggttgagaggaagaggcaaggggcaagagttaggagkctctgcctgcggtccatgtgatgtgtggtgatagctggattagggtggtgtctgtgagaaggtgtgaagaaaggaattaagagacctgtccagaggcagaatcacaggctttcaggaagaggaggctacaggtaatggagagacaaagagccaaggcgactctcaagtgtctgtcccggcagaactaacagcctcattgtgggaaggaaaactggtatgggtgagggcatggagtaacagaacaagacgaagttggagtcagcagtctcaagataaagaacaaataccttagaagttccaagaaagagctgggcagagttgaggaaggcctgggaaatgcaccagtttaggtttatcagcagccaaggaaagaggattcattggcttgagcagctactctgtcccaggctgatgcttggccctttcttggcttatttattcctcttgcagttttgtcgagggcatcaatgccagtattttaaccaatggagaaatgtgagttcagacaatgcacatgwctctcaaggatgcccagttgtgaacctggtattgaatgtggccttaccttggggcaggactcctggtcttccctatacatagaagtggcttccagaggatgaatagagggacctggcactcccaggaagcaatgaggagtccagctttgctttgtccaggagttcagacggaggcaacatgtttggggaagaaattgctactagttggcattattagtcacagcctaaaaatgacagtgrcctcataaaaatattgcaagtcctctgagatcagtgagaaaagtggagtggcggagcagaagctctgggacagcaactgtttccaggaaaggaaatctgtagtgtttggcgcaggagttaagaaaaggcctgacccagtttcatgtctccatgtcccttctttggggaatggacttcttgttcctgctcctgttcccctgctggagagtgatgggaaagtgctgtgaagccaatggcagagatacacataacagtgagatttgggaaaggggtaggctggtataaactgggataggaagttaaaaacatccgtgtcatttctcatggttctgtgggtcagggattcagaagggcacaacaggcatggcctgtctgctccacatggtgctggtggggttgaacctcccaggatgacctctttagctgtggcacctcagcaaggctggctccctggcaaagggttcctaagctggcttagctgagtggcatacctggggccttggttgaagctgtcagtgggatcctggggtctcctctacatagccctctccatctggcctctgcctgtgtccctccaggcagrctctttagcagggcacacagtggctccgggcccccacaggcacaaaagcagaagctgccaggcctgccaaggacttaggcccaggaaaagccagctttggtcaaagttagtcaggggctcggcttagacttagtgggaggggacaaaagcctcctcttctgtgaggggtgacaggtgtgtgtaggtgagagatgcctatggggaaatatcttcaaagatcagcagctgtcattaccttactcatctaacaaatgggtaaaaacatttgacccctaaatcccatcttgtagcccgtgaattacttggagtctgggatcttacattctctggcttggtatttaagccaggacctacctgggacaacatggagactattacacattagacatcacctctgtgccaggaatgctatttctccaatcttcacagcaaccttttgaagtccatgagatgcttcccattctgcaggtatttggggctcaggaaagttgtttggctttctaagattgtggtgatggtgaggggaagatctgaaacacctctggcccaagcttaagatrtgttggatctttgcagctctcacagactgcagggtcatgcattctgggcatggcacacctttccaggtacaacagccttattgtgagggcatctggcttccttagctgtatttcatacaacgcattgtacttgcaattggaaagacacagccagtggtctgggtggtcttagcagtcaaacagttgctgatggatgtattctgcaaaaatccactgcggcctcttacaggcctggaaactccatggatgagcctcagttttagatgaattccctgagtcatcacatcaccatatggggaagaacctctgctctttgcttatcctatgacagtaattggacaaatgaagtatgcaactgataattccatttggagcgagttactttttctatattcaggtcacaataagtaatttaggaaaagtctaattctccctcgctgtctctcaaatatgcaaatgaaatgtagtgcattttctccagtattttctgcagatgccaaatcagcagctattaaagttggataattacagtaattaatttctgtaagggagtggggaaacctcacaacaacagatagaatagtgaatcaaatgagaaatgagaccacacaaggaaatgctgaaacaaaacggcaggcctccgcaggttttggtgtaggaaatggagcagagagtttcagtagatgtcagtgttactagcaagatggaaagtatgtttcctgtcatcttcctttaggtcagcttggtggttcctaatactccctacatctatacccgctttacactattcacttgctctctctcctctatggatgagaaactgatggctttccaaagtgcacatgtcatcttggaggccacaacttaaccttatgggtgttctcttctagtttatttccagtgatggccacgttacatttgttctgtggtcctttcgttccagaggttcttttcccctccaaaatgctagctctacgagctgcttttggaaacagatattccagctgtttttctgcttctggcatcatcatcaatattagaaattgggtagtgggatttttactatgcacagtgcaaaaatggagtccagctcagttcttttggagctgagttggccccagaaaaaagtaactaattgggaataaagatactttccctttctagcaggcttagcagccatgagtgtctgtcataagagatgtggccgtgggctagagytctgaccagtattggaaggactttccagtcccaaatgccattccacttccttgagggctacggcttctaatcaggtcttaactgagggtgtttgctgtgcaccaggcactcacaatgcagagagtggaaagccaggtctagtttagcagaggttggagccagactgtgtagctgcccatgtgatatgtttgcttttgtgaataattacagaccacctactatgtgcctttggggattcagagacaaacgtcacaggacctgtaatctgggtttgaggatgggaggcagggaagtgtagaagatagtaaaacaacatcctgatggctataaccgaggtttgcccacaaggccttgggacacaggagagggaaagactcagagaggtggaacaccagagctaggctttaaaggaaagggatgtttatgccagatcaggtagaagaggaaggaaagagaagctcagacacagaaagaagcataaagatgcctatttggggactctgaatagttaagctgggctagaatagaacacatggatgaaaaggctaaaatagaacacatgaatrgaacatatggatgagtggggctagaaaggtctcttgaagccacattgtggaggacctcgaatgttgagctaagagaatttaactttattgggttgccattcattgacatcactgtcaatgtcatcattgtcattatcactgtgtttactgaacatttaccatagagggcagacttcaggctctgaaaacagcagattgtggtcaagtctcagctgggtcaccaagcagtcacagagccatgggaaaattatttaaactctttgattcttaacttcctttgtgtagtgtggggataatgtcatcttctttgaaatgttattgtgaggattacatggagcaatgcatggagcttagcatggtgagcagaacatgcacagggacacaggacacacttgctaaatggtgcagctactatcatcagttgctaaaagctttacaagcattttatcatttaatcattataacaaccgtgcatggtggatatcagtagacccattttgcagataaagaattgaaactcacaggaattaagcgacagaatcaatattgctgcactagtgagtgtacgtgcctgacctgaggactggacctcctgccccccaccaagttacctttctcatagggaagtgagaggttacagaaaggcaatggcacagtcaggccaggacattagagagactattgtcatcctcagtctgcatctcrcgttatttttgggtgaattccagagatctaaaggctgcagtgaagacactgctgccatggaagcctccagaacagcctggcaagacacagagaagattgggttcagggctgcatgtatctatcaactcatttatgcctaaatttagaaagggtgccattttctggaattagtctgtatttcaaacactgaactaattgtatgagtttcaagtaactaaaatattgacagcactaatagccctggatagcattgcataagggcaggctatttgaaaagagccatttccacyaacaaggaaattggtaaagtaggactcttgctttgttaaattataacacattggacatcccaaatacattcaaaatctgtttcctatgctctttcccactgagccccttacacaaagtatttctgttattcctcagtggaaaatctcaggttctggtcaaaatccaggtgacttctcatggtagtctcttaaaaagagcaaatagggccagttatggtgactcatgcctgtaatttcagcactttgggagtccaaggcaggaggattgttagaagccagaagtttgaaaccagcttagacaacagcaaactccatctgtacaaaaaattttwaaaaatcagccaggcatggtggtgtgcacctgtagtcccagctacttggaagagtgaaacaggaggattgcttgagcccaggaggttgatgctgcagtgagtgagccaygatygtgccattgaactccagcctgggtgacagagtgagacyttgtctcaaaaaaaacctaaaaackaaaaactaaaaaagcaaacagacataatctcacatggagaagaagggataaaaagcaagcttccatggatgtggaatggtggtgtaagttaaagtcagatggattcagccctggcctaattatcagctgaccttggtaatgttccttttccatgacatacgtaggctaccttgtttctctrtatctcaatttcaactactcagatttggcctggatcacagagatcacagactcaacatctcgggtccagagaggtaatgaacatgcataagtgaagccaggtgaatacagtagtcagtggtggagcttgtggccaaaggagagcacttgctcttctaaaggtgtgtacatttaattaaggagacatgaaacagaagcagaagcccacccaaatgaagcccaccaaatgaaacacttctctaggccatcaatttatgacccatatgagatactaaattccagctttttataatcagtgcatgatgcagtatcaaaatcatgagccttggagtaaggcttgtgttggcatggcagagcggccacccattagctatgtggcctgatgagattgatggaacccttttaagtctcagtgttctcatctgcaaaatgggtgtgatgatattttcccattgagaaaagtagaagagagcatagttgtaaagtccttagtacagttcctgccctgtgtatgsgtacatcagaggctggctccccacgcctgctcccttcccttctagctctgacagtctgtgttctgggtcgtggtatataaaattctgaaactattaagtagaaggtaatacattttaggtatatttccaactgacattacactattgataaattaataacaggaagttgatattgaactgtatgttaatatatctgcttatgagtcagaagactcagtactttctctggctggttctgcactttatcagtgatctaagagaagctgagtgtagctggcttaaggtagggaggggcagttagtcatcagatgttaaaatggggaggagaagggtccctgtcagcttgagcgagggatcagaatccatgggatcaaaattcagcagagacaatgaggcctgtgccatgtctgaatgcatgtctatgctaggtggggaaggacagaagagtgttaagtcctagcaggtttagggcaaggtcagtaatagtcccaagtgaagtgaggacatcatataatgaatttcaccttttgggggtgggtgagcttagcgtccagctgggtgggcaggctctgagctggggcacagacatgtccacttccaggacccccagaaagtcaggaccaagctgggaggtcccgggcaggcaggctctctacagatggggaccttctagagcaacaagccctactttcatgctggggaccacactggggactgttgtaccagggcctggaatgggtgttaggatactgatttggattagcctgggcctgggaccagagcttagaatggggacaacaaattggagggtagtcctgtcatctggagcatctggtggaggctgcttcagagacttgggggcttctcagatcagctgyaccagaagtgggtgaatctccaagcagttctcaagagcaaggtcagtgctcggtctccaggcttcccagccctccaggactggcaatctgaggagttcagggctcyatgcacagtgtttgccttgcccatgcrctggcatggggcagggtatggccagcagcacagcgagcccctttgcagggcacccgagggcccgaatgttgcaactctgcctcatgaccccccaaccttttgaaaggctctgcttactctcacctgccccgccttcacatgtgctgtttcctttccccgaaagcccattttcctcacctgcctagctctctcttcattatccttcaacgcttcattggcacatcactctttctgactatctgtcagccctctgggttaggcgcgcctattgtgttttagagtagcctgtgcttactaggcggctattctgtctaatgtctaaggcagagatgggcactagggaaaccaaggtgaagagtcacgggtcgagcagccacccacrgtgttgtgggggtgggagaggagaagagagagagagagagagagagagagagagagaaccagccatagtgtgaaatttaacatgattgaagtatggacagtgctggttgggaaagtcagaaaaagtttcttggatgaagggacacgtgacttgcctcttgagtaataagcaggagctcagcaaagggatgggattggaaaggacattcccagcttcaggcattaytggaaaagggcatggtgtttagcagaagctgagactgtcactacggctgcagtacagaggggacaaaagtggaggataggaagaaaaatgggaaagagagaaatatgctgtagatgtgagatcctggacttctgtttacaggacgaattgcccaccatctgcatgtaatttggaaaggaaacagaaagtttggagcaggcacccacccatccccatggttacagatctgcctagttacgttgaggaagccaggccctttacatgtggattctgctggttccatgggggttggaatctcttacacctaaaccacgaycataaactcccaagcctaccaggccataagggcactgtgaagcagcatatcaggctgagggaccatggcaaaatggaaagttcatgctcatataaagagagacataattctaagtaggcagtggtaaaagccataacttgtcaagtaaagctcatccgtaggccccatttattgctggcatttcacttacagtcttttgataaagagcttaagtcacttaaagtctatcatctctcttcaaaatcatgaagaaaaggacattttgaccaaattggaacaaatcattaatccaagtttgagtagctcagtaaagcccctagtgctttcagagtgtctggggcagcaggcactgggcctctctggtggttttcatttctgtgtgagaatgacttggttcatatgcagaagacgcacatatcttggaatgctgaacscaacacccatgcctctttaggggaccyattgctccaggacccagcgctcgctgggctttggggaccatattaatctggaccaagagagaaagtggggaacagagagagagcgatacataagaatgaacatccacagacagacagcgtggacttaaaggctagrtcgttaagtgaagaatgcagaaaattccttaaggctgccccgcaaatcactctgtgctaatttgccttgcgggcccagcccgctggccaamctggtgaccctgtgctcttaccactgagtcctaattgcacctccatcccgtctcctgcgttggaagtaatatgcgttaggaaaatcaatccatttgtaggrggagaaaccacactggtttcctgctactgctatcttcaytaaaaccccattttactggaactaacgttgaaaaaaacagcgcattttattcaaaacaaggcaatattggtattgacagagctgcagtgataatgaggacgatcaattttctctcctccattayggrgtattgagcaattttggagtaaacttgtggcatcattagacaagatcagcatttctcccttttgaaaactttcwgtttttcttttttgcatatttagattttaagtattcctgctatgttggggggaaagaagcaaaaccaaaacaaaccagaacaaacccagaagtccccaaagcaataagtgaagtgctggtaataaaaactggaaatcatagacatttctttttaattcttttgaataatacattgtgatgttatttttgccttttggttcatacagactgcatcccaactctcaccctaaattgaaataatgcagttaccacataaaataatccaagttttgggagatgagatattcaaggcaagagggtggatgttacttttytgttttgagaagagaagcaggggctgggcttaggtggatgaaggaagagagagttggagcctcagaaraaaggccttgggaagggagtcaaggacttcgggtggatttccatggggaagagtgaaagtgatggaatagttcagagmaaattaactttggcayttctgctttcagtttctgatccttgttgggctacacatgtccatctgccagttcaggctggctgtgcagatgccacattctggggaaggggaccctgtcttccaggcaagacctctcctccatatcagtgacatcatgtgctcaggaaaacagcaatgctggcaaatggtcacatttcagaatggcaaaatgcagcctgggaaggatgtccccctggaaagttaatctaatgtagttttatcccccttcccccagtgctcaccttttaaaccagaaaagttattgaagatgtcttagagatggggatttctctgaatgccatcagtgtgaggcaagagctacagggcccatgtgtttggaaggcaggcgggaggctgtgacaggggcctgggtgagccatccaatttttaaaacaatctagaaattgttgatgaacagtgtaaatatctttcttcatacattttaatccttgaaacatatgtgctacaaaactgtgttagctacatatggaagaacactatcttatttctgtcacttagtgctagcaacatactcgaccatttttaggagggaacccctcaaatgactgcccgcgtggagaggagatggtggaatgaggtgactctgagcaagagtcatgtgctcttggcaatttccatctctgggcttagcttccccatctgtaaaacgggtatgataattgtgcctccctcacaggcttctcacagtgattgcataatccatacatgtcaaaatgcttagaaaagggcctgctgcagcctaaatacccaggaaatattctcatcccaggataaaatttggccctcacagtagatgccaggccttgagtcccttctaacttcaagagccttgtgaaatgtgtgagaggctgcagggaccaccccatctgctgtgctcgatgttgtaaattctctgctggagcacgtttcaaactgtgctgggacaatgtgtctgcccacgtgtatcacctttaatctgtgaatcccttgaaagcagggacagtgtcttattcatctttaaacgcctagagctttacccagaagwtgatgttgagagccacttcattcttgtttgagaaagaataggaagagaggaagcagggaggactccaagaaagctcttactgggtggtgtaacaggtggtctgtgatgtgaagagaccagaccctagtcctccttagaaagagattattcaggtagtgcattcacagcttctcctggcttcactttggtggtctagaactcatttacatggccattgatctcctttcttgaaactacaaactgcggcaaaggtataaaacatggaaagaatgctggtgcctcaggtcgggttccctgggagtggagcctgagacaggggtccaggtatgtgggatttgttgagggaaggactcgggagggaaggagagtgagggaagccgggcagggaaagagctgaaggaggatgcgctcacagcaaagtcttgtctcagccggagcccctgggattctgaggcatgaattgcacaacacagtcccgagggcactggcctcattggctccagcctggagtatgtgtgtgtgtgcacacaggcatgtatggtgtgtgtggatgtgtgtgtggacacatgtgcgtgtacctgtgtgtatggacgcgtgtgcgtgtgtatgtaagtagggggcatgtaagtgtgtgtgtatgtgtatttgggtgggtagggctccatggcccctgggcagggcagctcttacctagtggagggcagttcttttttttttttttttttgcattttctttttttttttttttattatactttaagttttagggtacatgtgcacattgtgcaggttagttacatatgtatacatgtgccatgctggtgcgctgcacccactaactcgtcatctagcattaggtatatctcccaatgctatccctcccccttmcccccaccccaccacagtccccagagtgtgctattccccttcctgtgtccatgtgatctcattgttcaattcccacctatgagtgagaatatgcggtgtttggttttttgttcttgcgatagtttactgagaatggtgatttccaatttcatccatgtccctacaaaggacatgaactcatcattttttatggctgcatagtattccatggtgtatatgtgccacattttcttaatccagtctatcattgttggacttttgggttggttccaagtctttgctattgtgaataatgccgcaataaacatacgtgtgcatgtgtctttatagcagcatgagaaaaaaatgctcatcatcactggccatcagagaaatgcaaatcaaaaccacaatgagataccatctcacaccagttagaatggcaatcattaaaaagtcaggaaacaacaggtgctggagaggatgtggagaaataggaacacttttacactgttggtgggactgtaaactagttcaaccattgtggagggcagttctgcagagaaggggaagccgtggcaggtatacctctcatctggagaaggagatctgcatggagcacagtagcatccactgggacaaggaaaattccattaagatctaacctgtatccctctcacttgatacgacatcttatccagcaacaaaagagaatgtggacagtcctaagagtttttgtaaaggaacatcccacccaatccaaaccctttatccagcctgggaaggataattccaaagatttatcttttacaatgaaagaatgattgtaaaagcaatgtgtggtattaggctcaaatatttactgagcccagtctatgcactcttttctatgtgcttcaaaggacataagcagagggaagtagctggaaacctagttcagggttaagataagagcacagctattcatgtggcagcatgtgcttaggactgagggacaggcacaggatgatgggagggtgggcggagggagatggcacccaggggatgagagtggcttcagcaaacgcttctccccagagactttagttggcctgcagactttgagtgtggtttgagatgtctgtggtggggcctgtatctgtcaaggcagagtgtgtatgtttggtaagtggtacttcttttagtcttgtactcccaggcagattccaccttttactccgggggtgcgaactccaacacaggaactgttaggggagtaaagccaagctgggggggatgttggacccctggagggcacagctcccacccagcaccagccaccttccccccacagaggtgcaagccagcatggccagatcgtcccatcttttgagagaggccacaagtctggatttttatgtgacatcttcagacttttcaatgctagcagttaattcagaaactgctgaaatattgtgtgggtcaaacacagcacgtctaagaggcagacgcagcctcctgcctgctggcatgtggcctccatctttagccattgacctctccccacactgacctgggcagcttgtgtcctgccagaggctgcctcccacagacttgccccccsccaggtgaggagggcactggaagaaccctgagacaggcgtgggtgtagtggggatggggtatggtgggcgcagtctccttgttccacaactcaccccaggccaagttggagcctataaaagctgtccacaaggtgttctgccctggagggctcacagcttgctttggtcactcttagctttccgaggagatccagtgctccctggccagtcatatccagtccctggtgaagtcggagaagaaccgccaggtcatgtgcgaagcaggcttgcttgggaccctcatggcctcctgccacagggccctggtcaccagtggcagccccctccactcacgcctcatcaggatctttgagaagctcgcttcccaggccattgaaccggatgtgctaaggtaccacatgctgcatattcagtgccgccaagctgggcagccatgtcctttgcagggcaggggttgcacaatgggcagtggagagactgcagggacagatggagggcacggctctgtcctggcattcaaggctggagtccatggctgagccttgggtctgtgccaggcagtgtgcaggtgcccacaaagcagacatagccccctctaatggatcacgtgggggctggagggggctccaaggaagtggagctgcattccgaggcctgtagagttcactagacaaagagaggagggaactgggcctggaaggctctgccgggaggggtggggctgggaggggctgactgtgtcctgtagggagttgggcagtaagcatgtagggactgcagacatggaggaggatggggcagaacccacctggatcctccagggggctttcctgctgtcagcctctrcatgaagccacattcctggagagccatggcagggagagaaagtgcaaaggtgcacagggtgggaagcagggagcagacgtggaagacaagagagcagagggaagggaagctactggggagggcaggagtctcctatgccacctggagtgctgagggccatgcacagagcggggggccctgctgcttatacacaggagcaagtgtagagggcgcacagacagcctttccagccagcagacatgggacccaggggcgggcacgacagctgccagaggaggctgctggttatagtgctgcatgggaaattccattagaaacttataaacaattactacaaatttactttgtgacattattttttgttatgacatccatcttgaggctcctaaacttaccagctctctggtctggtctggctggcagggcagagacaccctgtctccacattgctttcagaaagggtgttccagtggggctgggaggtcagggagctccaggcatctaggacagttgtcaggataaagttggagaacactgttgctagtaaaatgtcttcattttttcctcttgtatgttatgttcagacagtttctaggtcttggaattccctcatctctgtcggccacaacaaaaatccttgattcatctcacacacacagaggcaaccctgggtgctcaggtgaggacagtggcaagaacggggcaggttaatgggaaktaaaagatgataggcattcctgctgagggatcctttacaacaggtgggaaagcaaacaggtttaaacatggttttgtctgctgctcaatgcagcaactgaggaaaaagcaaagaaattcctggtctctggagaaagaccatatccagatggagaaagatgaasccccacccagacatataagacagatgatccctttgggttccagatcatggaagcagagacagagtttccttcatgacacagcagtacgtggcgctgcactagacagaggtgtgcagggaaggcttctgtacagctcacagctcaagggcatgtcagagccttggaggcccaagatgcaggtggtacccctgtgtcaggcctagtacctggggaatgttggccagggaaccagcttagagaaaagaaacycgtggacatcttgaatgtaagatcacataagacctcaaggaaacaggcaggcccagtggagaagcaagggtgcgggatcaggcttggggctgacagctgcggtgggagcccagagcttacaaggagaggctgctgtgaaggaaagtgtgggctttgtgagcagacacaaagctccagtgagtaactccaatggggcaagccagagacagaggtggcagcagtagaatgtgctatgstggaaaagggatctgtgctggaatgaaagaaaagtttctagaaggagcaggttagcaacaccattccttgttatcagactcagcagggggcccgggctgggggccagggagccaccctcgctggtgcttaggaagtacctggtgactgtgcraaactctctttctgggctgcggcagatactttggggttattgtcagaagcgagacagaaatgctttgagcagagacacatctcttctcttgcttgctgccctagggtcacagactgcacagggcttggctgaggggccctggccagctgccccagatgctgggctgcaccctggagtcacacaggccccgcagcccttgggggaatcccaggattcaactactgctcttcagacggcgctgagcctcatctccatgacctccccacgcaacctgcagcctcagagggcagccctggccccatcgtttgtggaatttgacatgtccgtggaaggttatgggtatgacaggctttcacatatttaaaatgcactttattaattttgcagtgcctctgatgaattataatattgattgcaaacttgtagttcccattgaatctcaccactcagcagaggaaaatgtctgggtcatggacacccgcctactcagcggcctcccaggggctgtgtccccagctatggagggccaagaccctcttttccctggtgtggctgcattctggaacaccctcccatcctgcctgcagtgcaattccttcccttaggcatcctaccagcaccagctgcagtccatccttgggaccttatggtctaaggagggttacagtgccggcaggagggtagagtgggaagatgtcatggcccagactagctgtgtcagtgcaagagattggcttgcagtccaatgatctgagacaattttctatttccagctgtttgtttattccaaccctgtccacagttatgggaaccagcactgagtactctgtctctggaggaattgggacaggtaggtgtttttcccagatggtttagctctccatcccttccaaagtatgagtcttcagatagccttgattgcagatttttacttggtgtttcaataaagtgtgagctgtgctgggcatggtggctcacacctgtaatactgcaatttgggaggccaagacaggaggattgtttgaggccaggagttccaggctgcagtgaactatgattgaaccactgcactccaacctgggctacagtgtaagacccagtttcaaaaaaagaaaagcaaacatgagtcttgccttggtcctgagtatctgcagatgagttgttcttcaactttgctcctcttttagagcaagatgttctgttcattgtgcatcccaagggtccagcctatagctagggactcaattgacattgaaaaattggctcatttcgctggtgactgatgtaggctgagatggacacattacctgccttagatctctctctagagagaaatatgagttgggctgatggccgttgagaatagaccaatctttggcaagtggcttctatgcacagcactgcacttagctgaaaacacgctgggtgggacagtgcaagtgcctgatgctgcctgagccacacgctctgttaggagaattgggtttggggtttctatgggatcatgggtgctggggagccattgccttcatgacgtttttccatgtgagttggcaccaagtctgaggacacagcagctgatcctgcctgttctgtgaggacaatggacctgtctatatcgccaaccctgttatgtgatgggagggcacatggcattcctagattggtgccctttcctatccaaggttcagctgagctaggccaaggtcctctgccccacagagcacactgcctggctatagatcagctgaccaggagcccacgtgtgacggacctcagggagatcgagatcttctctgctcccttggcaaggcagcatgccataatggggaggagacaactggtgattaggcaagacacccagtaggtgctgcacctgggctaaatcagcaccatagtgaatctgaacatgcatgctcagcagggcagaacaaagcctgagggcatgcctgtgttcccacccaggtgccaccagaccgttccctcctcctggaggtctgaccttctcctgctggttcctgatcagccggcatggagctgccactgagggccacccgctgcgcttcctgacgttggtgcgccacctggccaggactgagcaaccctttgtttgcttctccgtcagcctctgcccagacgacctctccttggttgtttctacagaagagaaggagtttcagcctctgggtaaggtgctgggatccaaagccagtttcatccacatgtgggggaaatggggctaagtcagaagctctcaacacaggtgtggttagaaacctggtgaccttctgtttctcctcatcctttgaaattgctcccttgggttccayacctggtgaaaggtctacaatatttgttgtggttcactgtggcctgggctctaggcttgtaagtgtcaggcagatgaggccccagcccttggcacagcttcagagatgatgctcagtggcttttcagaaacttcgccctggcagaacagtcacaatgggacccagggctttgccttgctgggacacaggctgcatcctctcctgagtgaggtttgtgaagaacacacacaatttagctggagccgaagcagctacagacatataggcgctcccacatatgctyaaccccaaacccagaaggctggcccatgcttggcatggcgcccagggccacccctcctttggcagtgctagaggccagccctggctctgccctttggagcccagcgttgttctccaggctcatttgcctgagatggtcaagtccagtggattctgtccacttgttcttctcctgtgtcctgagagtgtcactgtttcatagggaaaaacattgggaggccctatgaaacagtggaagcggctgacacccttgtacacagcacaactgcctatccaactctctgggactcggcctacaatggagtctctgtggaggtagtctaccttgggatagacctgaagcctggcttctgggtttgaatcctggctgtatgaccttgggcaagtcacccaacctctctgtgcctcaggatggtaaattgggcatgtatgagcgcctacctcacagggctgtgaacatgacatgagttgatatttgtaacatgcttaaaactggcacaaaggaagagctcaaagaatgactgctgctattgctgctgctgttgtcatttttcatgagaggaggatctagggctccatggtacaaggcccagtggttgacgtccgcctatgccctccccattctcctgggttcctgcagtgtagcaccacacgtgagactcagtgttcatgctgtcttccagatgtcatggaacctgaggatgactccgagccttctgcaggatgccagcttcaggtcaggtgtggccagctcctggcttgtggtcagtggcatcacttggctgtggttgtcactaaggaaatgaaaaggcattgtacagtttccacctgtctggatggacaggtcattggctctgccaaggtgagatggctcctccaagctgcacttgccccacaaccatacctcctgctactaccctgaagtggcctcggtttcattctatgtttttgttgttgtttgtttgtttgtttattactggtagggttggcatctaatgaaatctgccttactgttcaggaaacttggctgagttcagacatgaaaaggacatctttagaaaatgcattgaaggtcacgctaccagggcagaaggcaagacatgcatccaggtctctaagaatagtcatgttcatgaaaatagaaaactccagaatgaacaaagcaaagcttctcattttgaggggcaaactcctcagggaggtctgggcagggcctaaggtatgacttttccaagaagctcccaggtgaggccaacgcagctcatcyttgcaccacacggaggagcaggacactagagtgggcagacaccaacacgtgtcgtcagatttagagcaagaaccatgaggaaggtaatagaatgcaaatgtatagctggaggaagcatctcatggctgtcatttagagacaccccaggtataagagaaagctgggaaaaggtggagctggcaggcgccagcagccattgtcagagaagagagggcccggaggaccatagaaggcaggtagggctggattttcacacaagttccagggagagcatcccaagctggctgcattttaaaatcacctgcaaaggctttttaaagttctcttgcacaggctgcacccagaataattacatcagaatctctctgggtcaggtaatttgacaacttactaatgtttgtaaaattttctaggtgattctaatatgcagccagaatggagaaccttacatacacagggtttctggattccccctaaatgccatagtgttcctcccctgaccttgcccagttgtgaccaccagtaacatctccagacatttccaaatataccctgggggtcaaagttgttccaggttaagagtcatcagatgagaacaaattcttagtcccaaattctgtgggacacatataggtgaatttgataccatctgctggtaaagttctgttatcaaaaaaaggcagtgatgaccaaatatatatatatrtgtgtgtgtgtgtgtatatatatatgtgtgtgtgtgtatatatatatatgtgtgtgtgtgtgtatatatatatatgtttttttgagataggatttcgctcttgtcgcccaggctggagtgcaatggtgcgatctcagctctccrcaaccactgcctccaggattcaagcgattctcctttctcaacctcctgactaggtgggattacaagcgcccaccaccatgcccactaatttttgtatttttagtagagacggggtttcaccaggctggccaggctggtctgaaactcctgacctcaggcgatccacctgccttgccctcccaaagtgctgggataacaggtgtgagccactgcgcctggctgaccagaaagattttgacaggggcattgaaagaacaggtccttcaaaacatagttaaccttttctgcaattattaacaatatcagtcctccctccttccctttctctctttcttcttttcctcattaaatatttattgagcacctgttatgkgttagctaatattttaggtgctaagaattgtttatgcctataagctaaagacctccaggaacatacatatagtataaggtgctaagaattgttttaggttctaagaattatttatgcttataagccaaagacctccaggaacatacatatagtataaaataaaaattagatttaaactgactatagcaagagatttcctatcccatggggtagtaaggagttaggagtggcttgttacagaaactagattcattttaggtgatttttaaaagggtttaaagaagtggaggtctgtctgttctgaattgggtgctgctggaaagaggtgcaatttggtgactgtgaatgttaataacttttatccagaaggtagagacacggaacagggctggacttatcattagagaggaagcagaagtccctcacattagttgggatgggatgtgtggtgtcttttgtggttgcaatatctttgtttttatctgtttaggctcaattactgagttcacttgttcttgtcttctttcacagaatatgttgatattttgtgaaatacttcaaataccttgaggcatgtcttattgatgtttgtaccttccttgaacttggcgcaggggctgacacacagtaagcatggaataaacacttgatgaactgaattgaatgtgcagccacaggaggaacatgactggctgstagtgtggttgggtgaagtggtacaggcattaacatcctccctgcgggacctgctaagcctagggccatcaacagggaggtcaggagtggtgtgttgctatatggagtggccaaagccaagactgacagagtgcgctttccaaaataatctcaacaagttgggtcaggaccagcaagtgaaactcaaccaagataaacataaaggcctgtgttttgatgcaaacatctgttggacaagagtaagatgtgagaacttcagcttaatttgactagtttaacagcccttctcaaaatgctgagcctttgtttttattgccaaaggaaacttacataaatttgtaaagatatggagcattttaatagtttgaattgggcaaaatgatttgggaacgatatgagacattagacatttattaggcaacctgaatggggcagtgtgcatacactgggaatttggaagacaggagcaaggtgggttggaggggtgagtggtgcttcagtgtgggagagagaggaggactctgtgcctgcgagaacagagagataagagagcacagaaaatcatactcctggcaagccttgatggctgaacaattggtttgtttttatttgaaaatctcacttaattggtagagtgaaaaagaatatttctgaaattctgtaaactctcatttagaaaaatacagtcatccctcagtttcctcaggggattggctccaggacccttcctggataccaaactgcatggatactcaagtccyttaaataaaatggtgtagtatttgcaaataatagatgcataccctcctgcatgcttaactaagctctagatgatttataatacctaatacaatgtgaatgctacataaatagttgtcatactgtatttttttatttgtattttttattgttatagcactattttttattgttctttttcctgaatatttttgagccaaagttgattgaatccaaggatatggaacccccagatatgcagggccaattgtacatatttatatatgtacaattgtatatatcttatgtatatatcttatgtataaaatcaaagatgtatatatcaaatgtatatatcttatatatagtgattttatagtaattataagaataatataaatgcattttgaaatagctcaaaaatagagaaaagattagctaccctcctactactttatcatattttgtaatttcagttttatccctttaaaaaatagtgtggcctcgaagtatagaaaatcttgtatactgcttagttcatttaacctctcatttaacctaacacttaggctatatggtatagcttattgctcctaggctataaacctagacagcatgttgctatactgaatactgtaggcaactgtaacacagtggtgaatatttgtgtatctaaacactctaaacatggaaaaagtacagtaaaaatatgatattattatctgatggaccaccattgcatatgtgctctgacactgacttggaacattgtaatgtggcacacagcaatatatggaagtatacttggaaattcatccaaacttttgcctgtagccacagttcattcttttttatttctgagtagtatttcaaggtatggatgtgccatagtttgtttagtcatttatccattgaaagacatctgggatgtttcaggttttggctattacaaataaagctttgtgagcatttgtgtacaggtttttgtgtgaatttaagtcttcatctatctgggatgaattccaagagttcaattgctggtttctatggtaattgaatgtttagttttataagaaactgccaaactatttcgaaaatgattgtatcatttgacatttccgctaacaatggatgagtgaggcagtttttctgcacttagcattgtcactatttttatattagccattttgatagttgtgtagtaatatctcactgtgtttttaatttgtatttccttagtggctaatgaggttgaacatcaccttttcatgtgcttatttgccatctgtatattctcctcagtgatgtccatccatattttttgcccattttctaattgcattgtttgctttttttttttttttttttttttttttttttgagatggagtctcactctgttggcaggctggagtgaagtggtgcaatctcggctcactgaaacctctgcctcctgggttcaagtgattcttctgcttcagaatccagagttgctgggactacaggtgcccaccaccatgcctagctaatttttgtatttttagtagagatgggttttcactatgttggccaggatggtctcaatctcctgacctcgtgatctgcccacctcagcctcccaaagtgctgggattacaggcatgagccaccacacccagttgcrtcgtttactttttttttttttttttttttgagacggagtagtctcgctctgtcaccccaggctggagtgcagtggtgcgatctcggctcactataagctccgcctcctgggttcgcgccattctcctgcctcagcctccccagtagctgggactacaggcacccaccaccatgcctggctaatgtttgttgtgwtttttagtagagacagggtttcaccatgttagccaggatggtctcgatctcctgacctcgtgatccgcctgcctcggcctcccaaagtgctgggattacagacgtgagccattgcgcctggccttaaactgttgagttttaagggttttagggttttaaaatgtatacatatatgtgtatgtgtgtctatatatatacatatatattctagacactagtcctttgttagatatgtgatttgcgataattcctcctagtctgtagcatgtcttttaatcctctttcacatgggtaaaatttctggttttgctgaaatataattcattagtttttccttatatgactcatgcttttggtgtcgtttgagaatattttgcctagtcctagatcctgaagatattctcctatttttttccctaaaaattttctagttttacgttttacactagagtttgcaatcaattatgaattaatttttgtataaggtgtaaggtttaagttcatttctttgcctgtggatgttcaattgctccagcaccatttgttgaagagtctatcatttctcaattgaattgcttttgcatctttgtcaaaaatcaggtgagcattcttatataagcttatttctgggttctctattctgttccatcgatctatgtggttatctttataccaatgtcacactatattgattttatagctatataataagtcattattagagtagttcctcccccaaattaattcttctttttcagagttgtttaaactattctaggacctgtgccttcccatatacattttagaattagcttgtttgtgtctacaaaagaccttgctggaattctgatagtctacaaaaaacctttctggaattgcattatacttactgatcaactcgaggggaaataatatctttactatagtgaacctttctatccatgaacctggtatgtctctccatttatataggtcgtcttggactttttccatcatcacttaggaattttcagtatacagatcctctacttgtcttactaagtatttcattttcttgtgcataattgtaagtggtattgtgtttaattttagtttctgtttgtttattgttagcctacacaaataaaattgatttttgtgtattgatcatgtatcctgtgaccttgctgaattcacttattctaggatrttaaaaaaaattccttggaactttctacatggacatgatagaaacagttttatttcttcctttccactctgtatgtatgtaattattgttcatacataaaactattaatttgccaatactagacattcaggttcttagtagaatgactgagataagaaaggtgtacacttttttgtttcttaatattttttatcaaatttattttcaaaaggacagtatcagttttttactccacatttaataacttgttttgcgcatacttctgagatttgagaattatattttagttttttagataaaatacatttttactatgagatgagaataagatgcatcatgttatatcactttgtatttacttgattaactctgagatcaaacactactcactcttgtcctttttattttaacagatgttatacatccaggctctaccagggcctttcctttctatggatccatccgcatttgtggatgtttatggatatattgctactcctcgagtctggaaacaaaagtcttcattaatctggcgtcttggccccacatacctctttgaagaagccatttcaatggaaactctggaagttattaacaaacttggcccaagatattgtggtaacttccaagctgtgcatgtccaaggtatggagtgttttgatttacaatgttcttgctgatattagtttttaaatggacatccagttatttgtagcagatttgcagagaataagctcagcgttaaagtcagtcattagggaagacctctgtaattgtatcattatatatttacaacccaagagaaaatgtcacagaaaaggaaatgacaatatctttagatttcaactccaaagccctaatggggaagaggtgggttgggcaataccatcagcaaagaaagagagaagagaatgagataaataagttacattgcttttaatgaagaagctttttaactaaagtatactgttgacttcaattattaaacaggcagacaaaacatccacattttcattattgattgttgttattcaagcagggagcattgttctctgtgctctgtcaagtcaaaggggtcagctcccatctggaargaatgataaatgaatctatgtcagcagcctgtatgtgctgaagggcgattgagtgctcttgagcatttstgtctccaggcccatgatgtctttgaatttcatttcctgtggcaaatggcactggccagagcaatgggacgaggtcaggtctagagccaaagtcttaccaattctatattcatgrcacctttctctactagcacattgggtatcattgacttagagaccagtatgttaattcaaactggggtgtttgccgtggctgtgcagctcattgaaaattagacatttcagatcagcctatttcaagtcaggtttcttgtcacttaagagtttggttttagggaatgaggttatatactttacagatgttttaagctctggtagtttcgcacctggagtgcatctatttcatggtaagacaaatcttgggagagttcgccacagttttctttttttcttcctcttcctcctcctcctcctcctcctcctcttcttcttcttcttcttcttcttcttcttcttcttcttcttcttcttcttcttcttcttcttctttctacttctttcttccttctttattcttcttcttgcttctccttcttattcttcttcttcttcttgcttgcttcttcttcttcttcttcttcttcttcttctccttctccttctccttctccttctccttctccttctccttctccttctccttctccttttccttcttcttcttcgacagagtctcactctgtcacccagactggagtgcaatgtcatgatctgggcccactgcaacctctgcctccccggttcaagccattctcctgcctcagcctgccaagtagctgggactacaggcatgcgccaccatgcccagctgattttttgtacttttagtagagacgagatttcaccatgttggctagactggtctcgaaatcctgacctcaagtgatctgcctgtcttggcctcccaaagtgctgggattacaggcatgagccaccatgcccagcccacggttttctataactatcagagaagaggggaaaacaaatgacatgcaaacatacaatgtgcaaaaacatgcaatgtgacaacatacaaacatcctctcaatgattactttgctgtgtgacagagatattaaattgtatgaggattaatttcctgctctgtaaagttagactagaaatgtttaaagatgtgttgttacaggggaggacctggacagtgaagccacgccctttgttgcagaagaaagagtttcttttggacttcacatagccagctcctctatcaccagtgtagcggacatcagaaatgcttacaatgaggtggacagccgcctgatcgccaaagaggtacatcttctaacttcgctgctaatctctgttggaatctggtttcatggtttgcattagctttcagtgcttaagtaaacactatttcatgtttgcacttgtgtagatggatacacaaatacatgtttcccacttcatttgttaaaatatcctatgcctccccacccactggtgtcctcccagactaagcctttcatttataattattcagagaagaaaaatcataaataaaagaacaagaacaaatgacatattttaaatacctttgcaacattgaaaacactattgagcttccctagtcctgggtattaatgacccactaacactgagatattctttgagttgttgtgatttttttaattttaattttttatttttttacagatgggatctctctatgttgcccaggctggtcttgaactcctgggctcaagtgatcctcctgcttcagcctcctgagtagttgggattacaggtgtgattcacagcagcacccaatattgctgtgattaaaacaacaaacaaacaaataaaaacagtaaattttcaaarcaacaaggagatatgtttgtagatggggatgccattaaatttacttccaatttttgcataaagagctcttttgcttagcactgatgaaaatttgcaattcgtttatattccttcaccctaatggacagagggtacccccagaggatggggagtcaggaactaggtcctgttgatcatgaaagttgtggcttagcagyaacacaccgctttctgatgtaggagtccaggattcctatcttcttgcccctttgacatctgtagagattgggctcccagagcctgaacaaccctagtctgagaaggtggcagccctcaccttggtagcgctgttccacctgaaagtgtccttgggtccctcttgctcttcttagcacctcactgtgagcacgtgggacactggtggctcagactgcgtaactgaagctgctcacttacaattcagccacagcttgggagacagaatgcatgagcctgaatttggcttcaatcccctgacattggttcaattgctattcattccatgatcattgctgatggagtgtcagcactgggccaggccccagagggcctgccctccaggagctcgtggacaatgcttcttcttttgcaggactttcttaggactaattgctgctcatttctctagatgaacatttcatcccgtgacaatgccatgcccgtgttcttgctgaggaattgtgctggccacctgtcagggtctctgcggaccattggagctgttgctgtgggtcaattaggtatgttcaactgggaagctttgccgctatttgggaagcagggtttgtgctgtcatggcttgtgcaccctggagttctggagtggtggacaggatggagtgtgccagggaaccagggtcgggaggaccagagttgggagtgaatccagccagagagttagtctcccagaaagcatgaggatctgttcacctggccacatgtggcaatcagtggtgagctcagctactaaccaggctgctgtctgtgacgacaggaagctgtctatctagtgagtacagtggggcttttaagcagaagcactggttgtagttgtttgagtgaaaactgctggtcaccattcaattgagcaatagcaaggcaacaaattggtgcaagtgccctgcccagcaggatctagaggacaggcaagagcaatgggttgttagagcaatagggatactgaggctcaggggtctggctcatccaacactctggagtgaaggcagagggcggcaatctgaaatactctgggctgttcagccttctgatggcaaagaaangacttagcacagtatctcccagccatctaagactttcagaacctcctgctcttccccccagcctgtcccaggtgcacaggtccctctggctgtggatggatggtggcactggtagctcattggtcctcctgtgctgtcggggaatttcccattgcaatgaagctgtgacatgttgatgaaatgcccactttatgccacacaggggtgagggtattccactccagccctgctgccagcagcctggacttcattggcgggcctgccatcctcctgggcctcatctccttagcgacagatgaccataccatgtatgcggctgtgaaagttctgcactcggtcctgaccagtaatgccatgtgtgacttcctgatgcaacacatctgtgggtaccaggtaatcccatcctcccacctggaactgagactcctgaaagggctgtcatccctgggaaacagggacaagcgttgcttgcctcagttgcattccctccagggtgacttctagagaagggcagccgaaagcccttgggttctgagaccagcaacttcgcagcagaggaggggcaggcgacagccagcccaagagctctgctcaggatgaggatgctcacctgattgtggcttctggcccttttcactgacaaattctaatgtcatttgtggttgtctccccaccttgtctctagcatggtggctgagagcccaggctgcagagcagactgccagagtttaaatcctatctcttctaatttgctatttaaccttagatgagttacttatcctctgcctgtttccccacctgtaagatatggactgtratagggttgcagtgaggattagatgatttcacacaagtgaagaggttagaattatgtcaggcccagaatgagtgctaagtaaatgttagtcatttctacttcttaatctctttgtgcgtcagttccctcatgtgtaaaatgggattatgagagcacctgttttgcagggttgtgatgactgtgtttatatgtgttgagagcttagaggagcacctgcacasgggacctgcttcgcatgtgtttactgtgattgtcattgctatttagaattsgtaaagtcagatgagacatggccactgcccttgagtaacttctcacatgtctgggaggcagccaggtgaggaattaggagggcagggccagggtcggagtctgggccatgtcacaggtctcaggcagtggaggcttcctctggtgtgggggctgctgggtgattggggcaaagcctcctgtgtctctcgctactgggtcagggttagagcagaagagagctgtgtgatggccttctgggcactccccctgtctgtctggactactgccacagctggacagtaaccccttcccccagcctgtccctcgtagcccactgatgccagctgtagcccacatcacatatctggtggtgtccctcctgtgtgtaaaaccttcaaaggcatctgattaccgataccatatcccaaactccctagacaggttttcaaagccattcaaaactggccacagacctttccttccagccccatctccaacccagccaacatttcagcctatgttcccacctccccaaatcctgcaccttctccaatcattaaacagtgtatgactttgtgtgcctgtggcctccgctcagagcacctctttttttctccctcaagcaccctccttctgttttccaagatcaagctcaaatagcaaaggcagcattctcttcccccagctgagcatgtggctgtttcctggtcctcttggcactgtgggcacatcccgttttaattgctctcgcacccacactggaatgctcagtctacacatctctactggaatcttctaaagatcctaaggttttttactctttgctggtgtattactgacaccatgaagacactcagtacatgttttgggaatgagtaaatgggtatgtctgagtttatgctaaaactcaagaattggggatattggtacacaaaggttttctctgaatatgctgttaaagataatagtagtaggatctattctaatacagcacaaggatatctgctgtggttagggattttaataattattgtgacaatttctaaaaaggcacaaatcatttcctgccctcatgagtgtatctagaaggagaaaataaaataagaaccaaaataattttaatataaataaaaatgcaatcggtgtccaagattcacatcaagaactactacatgctttgtgactcactggctacctggctatcttcccagaaactctgagcttctcagaaagctcagactacctcaggctcactgtggtctcattgccyagtcctggggatggtgggtgggcgcggtgagctctcagtgagggttcagaaatgagaacattgccttgagaggaggaactatctaccacagaggtacatagcgcctgctgtcacatgtaggtagaggggtcaaaaagggttttgttaaaaaaggaagctcatcaagaggtttcctggagactgagctgactgagctttccaggaagagatggtagagacaaggagtggcccaaggatgtaatctctttactcaacttaattgatcaaatgcttcctaagaccaggcactgtgctaggcactagggatgtgaggtgaacaaggtgggtttagtccctgttttcatgggacttaccatccaagaaggtggacagaaaaatactgttagcatgagggagagtctctcagatacctcctttgagtaaagaactcatcagattcagaggtttattgtacacttacacatgaaggcagaataaggaaaatttaaaactgttattctgtctttaaaaaggaaacatttcaaatatttatgtctttggggaaaatcagaaggagaagctgcgtggcaagagaggtggtaaatggcaggtttgagtgaagaaatagtattattttgtttttgyttttgtttttttaaactttcttgtccactctttataaaatgcaacctccatcctccctcatccttttctaggcacgttttctcgctttgtgtttctttgtaacctgcatgtgcatttgcgtgatgtctgcttccgtattgccacgtttgtgtctgtttcacccccaggcacatgcttcataagagcgtgtgtccggcttgtttattgctgtaccctaagaacatgccatagatagtaggtgctcagttaggattgaggaatgaatccgtgaatgaaaacaggggtcttcaattaagtggcttgctcaggagtggatttcatcagtttttaggttttactctaggctcatctgctggtttactggttgggtgggagagcataaaccttcctatctgttatttctgtctagctgatttatcagcctcttctcagactaagcaatagccagctgagttttataggatgggtgttcttaatatggggaaagaggaggatactgttccagactaacattaaaacacttccaggagctggtctgggttcctccacacggctaggaggagaggatggttgtggagctgtgcatggcataccgaatggagggtagggagccatagccttaccactgtggggaacgtaggttctgcctcacaggtgatgggcaattgcaggaaggccgggacagggaarcggactgacagaggtgttagaacaccccttgacgtcagtggagaagatgaggcatggggatgaggttcaagcaggggctgagatagaatctgacctaataggagcctgtgttcctgacctggggagtctcaggatctgtgagcagcctgggcaggtggcgctggaaaggagccagggcggtccagcaggccgccgacaggaaggaagggagatgctgggacatgctcagtgggaaatgtttgtgagacattgaaggtgaagtatcatgtgggagagaaggctctggagctcagggacaggctgtgctggaggtgtaaatatgagggtcatcgccrccatgatgatatttaatctaaggaaattgatgaaatcaccaaaaagaagctgtacagagagaagaaggttgagggggaaacaaagaggagctaaccacatggagctgggaatataattaaaacccagtaaaggagattgagaagcaagagggaagaaaaatcaaagacagttatgtcaaggaatctgaaaaaagaacgtgttttgagaaggcgggtatggtcaaaccatgttaaatgctgataaagaatagcacaaacaaaggatggaggygtcctctttggatttggccacctggaagtccctggtggcctttctgagggaggtagccaggtggaggcagtggctgrctgatgcaggttgaaaagagaatgtcaggtaaggacatggagccagggtgtgttgataatgctttctagaagtttgcctatgagcaggaggagctgcataaagctacagggattagggatggagggagggttatttttacaatgagaaatactagaatatatttgtacataggaggaagagatccagggttggggcagtggaagcttggagagaacagttatctcaaagagcagtgtccttgagatggtgaccagtaggatccagagaccaggtagatcggagactctgcttgtgacaggaaggaatgcaacacgtttgttaatttggtggtgggaaaaaagaatattcatatctgatgggttctatcttttcagcaaaatatgaggtcaggtgggggagaggaagagaggttagaggagagaggagaagcaatgaaaccatgatctttaggataagaaaatatagcttattagaaggacagagttggattgccagaactgactgagtgtcagtttgacatttgacactrtttgatgtaaagtgaagccagtcagcctgaatgttttcacatgcaacttttagccatcctaattttgtcttgctgtgggatttcatatatgtgtgtgtctgtatatatatatatatatatatatatatayatatatatatcacacatgaatagtctggaaagatattgagtcttttctgatcacaaacaaggcttccgaagggcacgttgcaagaacatgtctgggaggacagggagaaagggcgggctgtgttggagccattgatggggaatggagccatggatggaaggagctgagactccagattaggtcgctcaaggctcatatgccaatggatggctgggcagactgactcgtgtggggctgcagtcaacagagatgtgaggcttggtgggacccatcttcttagtctgagacaagctgggtcaccaaatgtatgctgggacccaagtgcctccatgctgggatggatgcttcatgttgctggcttcccaggggctggtgcaactgacaggcacatctggctgggtgcagccaggctcatgggcaggtggtascttcccataaatgcagcatttatgggatggttacgcatgtaaaggacccagtaacagaaaatgagaatgaggcttgaggagtgtgggaggaaaccaggagagagtggcattctggaaacatggaaaagatgcagggaaaagtaagagtcccagtgagaagtcaggtcatagcacagaaaagtggccacagaagttgatgtgtattyttcttctgagaacatggaatgaaggatggtagcagcagagagcagaagstttgcagactggactgggacaagtgggtgaaggggaaatctctaatgatgcattcatgaggaaactgctttgtgttaaccttttcagataatggcgtttctcctgaggaagaaggcytctctcctgaaccatcgaatttttcagctgatcctctcagtggctggcactgtggagctgggcttcaggtcatctgctatcaccaacactggtgtcttccagcacatcctctgcaatttygaggtaaatcagagattggcccttagtccttcaggagtgtgtgtgatrgtaaatatgctaagtctgggctttcccctaaacctagcatgtcagcttccctcatagtcatgatggtagggagagggaaaaccaaacgagcctgcccagaggccctggtttgtaatgacatgtgccacctatggactgagtggcttcggacaaatctcttgacctctctgagccccactctttttcttgggtgaagtggagaccttcatctccttgcaggctgtcatgagggttaagccagatagtatctgggaaaggatttttaaactataaattggcatatacatatgagggtaaagaaaaatgatctcagttcctttgggtggtgctttgctgtttccaaatgattcttgaaaggggtgagttaagggatgcagaaggacacgcctgaggctgaggagcatcgcacacaactgctgtgggtggatcaacccattcatgaagcatcatttactgagcaccctctgggtcaggtactggccatgtcctggagacacagtgaaaactagaacccagcccttccccacagccagatgggactgggacatagccaatgtaacactgcaaatgctaggtgcttcagtgagacaggcacagggcatctggggagtgggagtgagcaggcagtcagaattcagggggaaaataaccttccaggtggagtgtatatgctatttgcaaatactgtacatcagagtgagagcagccatggggacttgagagcaagtggcttgttgggggcctacaggtttgtgttggttgcaagagcaggagagagagaaggcaggcccaaggggttagactgcccagactacactttagcctgggcatgtggaggtcctcaggagaagtttcaaagctctttctttgtttattaagaaattgatatatgtttattatagaatattttttaattagagaaaaatgtgagggggaaactctcctattaccaagacctagttaattcttgtcaaacctggatgcattctcttacagtattttcaatgtataatacatttttaaaatcatagtcatgattatactgtaggttattttgagtctagtctttgctcacataccaaaaacatttaaacattttcattacaaacacaagcactgttttgagatcagaataatattctgttatgctgagagttcctggtttcttcatcatttctctattgccaaatttttagattctttctatattttgttataaattgtgttatagatgggacttttgtgctgatatttctctcacttttaaaaacattttcttagaataaattatcaaaattaataatgagaataaaggcattatgaacaatttttagattgttgataagttttaccaaacttttgatatctagggatgttaactgtagaatgatatgtgagaattttattttaggtatgtgacttcggtgacaagagctctgaagcagggagatgggtcatgagatgattgaagaaatctgggtagaggattttgaaacctaaactgaggcaagggtagtgggataatgaggacagcaggtgaaaaagtcgaacttgaaccagaagtgacttagagacacatgacaagggaaatactacatatcaaaacaccacagggctgctactgaaggcaggaccagagggagactgacagtcatcaatatgtatattataaaaagagaatactctttgtataatatagatcaagattcggttcaacgtctaacttctaacttaagatcaagaagttagaatgaccaaacaaaatcaaaacgcagagaaagaaggaaggaaacatataaatgagaacataaattaataaaataggaaaaaaaaacatacagaggatcaacaaggccaattactgtttctcctaaaacagacaaaygtctgttaagattggccaagaaaagaagacagaagccacaaataaataatattaggaaggaaaaggggagaataccacmgaagaatgagcaattagaaaggaaagagacaattggattagtaattttgtgccagtaaattagaaaacttagttcattygaacaatctcatcgaaaatgtaagttttcagagcgcactctaaaatgaataaaaaaccccaatgatcctagaatcatcaagtaaagtgagtcactggtttaaaatctgttgacataaacaacaaccagaagggaacgccaggctgggcactcatagggaaattccaccagtcaggaaataggttctttctagcttctttaacgagctaatcttgatggcagaacacaaaaggacagaacagaaaatgaaaaagtacaggctaatcttatttgtaaatataggcataagagccctaaatatgagattagccagttgaaccaggccaagatgaatgtcctggtcctggatctgaagctggaaaagaggattgtggaggaagccagcatggcctggagaatgggctccctgtgcacaaggggaaagaagatgtacataaatggccataaaaccccactaaataagataatgtgtcttgactgcaaccgctgctgccccttctgaagtgctgtggccatgctcagccagtctggctccaaggtgtcctggccaccagcatggcccaggaattactaatgcaggaacccatcatgctccattgcctgctactagaatggccatggacaccaccctaccccaccccaccctgaataaaactaccctcttcaggagatctggtgcttttaaagctggatttaagaaaataaaccaccaataagaaccagatgctaaaaagcaaagcaaagtgaaacaaaatgaaatgaaacaaaataaaatttaaaagattgaggggagagaatttcaaaaagggaaaaatgtttcccaaatgtcatgttctgcctacaccaagtaaagtgaggtaagggatgtgtgcactgtacgtgcccattggaggtcactgacagacttagtgacaagtaagttgtggggtcagaagccactcagaagtaaggagaaacggccgggcttggtggctcatggctgtaatcccagcacgaagaggccgaggcgggtggatcgtgaggtcaggggttcggtaccagcctggccaacatggtgaaaccctgtctctactaaaaatacaaaaattaggtgggcatagttgcgggcgcctgtaatcccagctagtcgggaggctgaggcaggagaatcacttgaacccataagggggargttgcagtgagccgagatcatgccattgcattccagcctgggcgacaagagcgagacttcgtctcaaacaaacaaacaaagaattaaggggaagtgtggggagactgaaagtggaggcagtcagtggactttggaaaatagcagagaggaagtttcagaacttttggttttgggtttttgttttttgtttttttttgagacagagtctcactctgttgccagaccggagtgcagtggcacaatctcggctcacagcaacctctgtctcatgggttcaagtgattctcctgcctcagcctctcgagtagctgggactataggcatgtgccaccacgcccagctaatttttgtatttgtagtagagacggggtttcaccatgttggtcaggatggtcttgatctcttgatctcatgatccgcccaccttggccttccaaagccctgggattacaagcgtgagccaccgcgcccagccggtttcgtgttttaagatggaagagacttaagtctgtttgtaggttgaaggagaagackcagtaaaaaccagacagttaaaatagtagtgggagaagaaactgctaatgagacacatcctcagagggtttggagacaagagagtggatcacaggagaaacggtgggatccgtgatgactggtgtgaagcagacaggaagaggaagttgtgaggaagggagagacaggaagtcattgagaagggaatggacaggaagctgtgagggagggtgggtacaggagattgttgaagcagggagggacaaaaatttgtgagggaaggagggacaggaggttgtgagggaaggagggacaggaagctgttgaggcaaggttggacaggaagttgtaagacagagttggataggaagttgtaaggcagggttggacagaaagttgagaatcagggaggaacaggaagttgtgggcttctaagtcttaggttttggtttctttctttctttctttctttctttctttctttctttctttctttctttcattctttctttttttttttttttgttttgagatgaggtctcactctgttgcccaggctggagggcagtggtgcgatctcagctcactgcaacctctgactcccaggttcaagtaattctcctgcctcagcctcccaagtagctgggattacaggcacgtgccaccacataaggctcatttttttatatttagtagagaagggatttcaccatattggtcaggctggtcttgaactcctgacctcagatggtccacccacctcggcctcccaaagttctgggattataggcatgagccaccatacccagcctctggtttcttaaagaaggaactgactagttcatttctaagagtacagtcatctcaggggtggggagagagcaacacctgacacattatacagtccatactcaaacaaatctaatccagacatcttaatatagtccttagtacaggcttatgtgacacagaataacaatcaaaagattcagttattcatgtttcccaaaattctgacatttggcattatgtaatttcctgatgagctaggcagcctcaaatgggtgtggcaacttattattgttgctgtgttctggaaaggaaatgtgagaggctggaacttttgtgggaagtgtaaaaggtgcaccttattgtactggtgggttcacatctgactttcttagttctctcagcccttagccccaggcctggcatatcatttgttgaatgactgccttcatgaatcaatatcctaagtgtgcagggctcttggagccctacagacatgtatgttggggtgccatgctggatacccatgttttcactagagctgccttcatcaataccagctgtcccaaatggcagctggcccacctctgtgtgtgcctttgggcagtggctgtgcttaaaaaagcaggaaatctgtcactcttttcctggcggaagaacaatccactcattttattttattttgtatccactcattcttttaaaaaatgtaatgcatctttacgaaagatagtggcatgtatgatgctaggttccagggattaaagagggacagtctctaccttcacaggcctcccgataaacttgtgttcactggggttcttttgcatttcctcttcagcaagagtaagcaaagtcatgggtaactgcttagcttcaagcaaggttgagtattgaccctatgggtcactatctgtaggtgatacccatgggtacccagtgtggggcaagggaatgggcttygtagtcaggtggattgactttgaaaacagtctctgccaattaaaaaaaaagtctggtgccagaaaagttacttagtctccctgagtcccattctttctagctactagatgcagataataggccgggtacggtggctcacacctgtaatcctagcaattttggaggtggaggcaggaggaacacttgagcccaagarttagagactagcctgggcagtaaaacaataccccactctacaaaaaaattttaacaattagctaggcatggtggtgcaaacctgtagttctaactacttgcaaagctgtggtgggagaattgcttgagcccaggaagtcaaggctgcagtgagtcatatttgggccactgcgctccagcttgggtctctcaaaaataagaaaataaatacataaatgcrgataataatattttgggtctttttatggcacctcttgccaccaggaaatgtatcagttattaagtgcaagctctttttgctgctatatgagtgcacgcttataatcccacacctgaaccttgtatagtctgggccttaggaactgtcagtatttagagaagaaaaatattagagttctctaaagggaagtagaaataagacatgatggcatccatcaattctgccccagaaggatcactagcagctacatttgtttactatgaatgaaaacaacctgagtgatcaacttcactttcagaatctcagtgaatttcatatctttgtttcacttacaattttgtcatgcatgagatgacactgtggtttgggctgaagaatgtgttgcctgcgcaaattgggtatgtagtcagtacagtgtaaaacctgaaaatctgtacctggcttctatttcctgtcctgccacttgctggtggtgagtggagactgtcactcagctggtctgtctcagcctctattttctcatctgtaaagtgggaacatcatcatttgtcttgcaggatccagggaggttgagatgagtttgcaatatggacacttgggctgtgggcccaaggctgagmagatgggggagatggttagtgcaggcgtccttggttggaaccaggcccacaatgaagtgccaagtagcagcagagatggcgagagaaggccttcctacaggggaggcacctctctgcttggagtgtcaggacagctgatctgattccagagctggtacatcatgttgatgattccacgtcagaggatcacctgtccagcactgaccttctcatgcttcctgcaaatcattcttctcccacaccttcattttagcatgtgttttgttttgtcttccagctctggatgaatactgcagacaatctggagctcagcctcttttcccatcttttggaaatccttcaatcaccaaggtaggctgggtcttggcagcctgggggttagaactgaaggctgaatgtccagaacwgagacagggcagggtggccagtggctcttccctgctcccagaacactgggtccccaaatgggagcacatccttcccagtggctcatgcttgtggggcagtctcctctcatggtctcgggcctcaggagggcagatgctgggggcttagaggcctctctagccccagggactagcacatactgggggctcagcaattgtgaccagcaaaggtccactctccctctaactgacttctccaaggcacttttggaattagtcagggctcttttacccttcaagtggtagaaatacaactcaaaccagcttaagggatgtaaaagagaaggaaagaaggaagggaggagggaaaaaagaatacaggaagaaaagaccagtaaagagggacttcgttggctcttacaattgaaaagagctgatctcatcctgtagctgggggaggctcacatcattttctctgagctctgtcaccactcttgcctctgcctcttccactcagtcttcaggttgcccgggctttcttctgtggcagaaggtggctcctgggcagctcctcagagcacatcctcagcttagcaccataggcagagagacagctttttaaaaatttaacagtcttagctattggactgagtctcattgagccaactgtgtcccatgactgggctggaaagtggcttcccctctggagttagaaagtggtagttcccaaagggagccaggggctgtgttcagaataagagagaaggaaggcaaggaagcccacatatcaccccacctgcctcctcctggctcaggctggtctagagctcattggtgccttcagcattttgaatgtatttgtaaatggctttccactcatccacttaatgaacatctattataaacttactacatttcgcaccctgtacttagaggtaaaattcagagaagaataagccacagtctgataaaaagagaatacagaaaaacatgttgttcagtgctgtcagaggaaacagaaccaagggcagccgggacttctgggtagaggagcatctgtcttctctgctgagcctgtaattataaatcatacacagaattgggctctggtcctgcctcttttgtgtatcagggagatggagctcagcagaatttaatgtgttaatacaaaaaaaaaaaaaaaaaaaagacagttcaaagtgaggaatctgcccaaagtcaccctcctccacatttttctccaccattttttctcttccactttccactttgttcctgtacctgtaccagttgttttctaagaaacagatatttatcctgggagctgttttctttgggggagtagaatttactggaaattggatttgtgagtatctgagggagggggtatggataggtggattctgtctttttctcctttgactttcagtggcgtgtctctccactttgtggtttggggcgggcaggaagatcacacaaccagacaagctagtgaagggccctgcactcctggctggtgggaagtactccccagtcacatgagtgtctgctgtctttgtttgagtttctgaggccagcactagttttccctggggctcagaatttaaaagtcaataattggggtttgtctttgaaggtggtttccggggggcggaggggacaggcagtgcacacccgagcgactctggcacttagcagacacatattcaatgggtgtctgacggcatcttgacaaattgccaagagagcattggagttaaggggccatggaacaagcctggcttgaaaaacctttttagcagaaacacagcaaatttggttcattccagtaaaagcttttactgtctctctcctgtactcaccagggaaggacccaggaatgctgaagctgcccaccaggcacagcttatacccaagctcatcttcctattcaatgagccgagcctcatcccctccaagatcyccaccatcattggcatcctggcctgtcagctgaggggccacttcagcacccaggacttgctcaggtaccacaccaagctgcccagggggaagagcagggccccagggctgtttaaaaagggaggacagaccccagctctctccccattgtgctcaaccctgaatcacttggaaccttctaggaatttttgcycagggctgagagttggggaaaggatggtttgctgaagtcaggatgggacaggccggtttccccagcagggctgtgtgtttactgttcccactgctcaggctcccccactgtggccaaatattcaggaatttccataagcactgccatccttgscagccaatgacccacatgcctggctcctgcagactcctgaagagcagtcccagccaccagtgtgtttccccttctctttcctgtcactatctraytgatcaggtagagccagagttagcrtctctggtgaatcctgactgattttagaagtctctggaaatacacagcatgccatgatgatttcccttaaactctcacttgcagctgcacgtgggtgggtctatgtgaaaacactggcatgtactcagcggactcagttgagcccgcctgcgagcctgtccttctctccctgtgtataaaggattgggctgtttgttgtgtacaccctcaagccttcgtcggtgaatgagaggcagatctgcatggacggagccctggacccttccctgcctggtgagaagacctttgccagttcgaaggcagtaggacggccctyacggaacccctgagaggcccacattgtgcagagggaggggctaagtaaggaaggggaaggcacccacagccaagccgtggtttccaagcmgtggcctgtgaggctgtcattttatgatgagagtcagaaatgaaataaaattatrgattcctgctttgaaatgtgggactggtgttccaggcctccagaataaaatcagttccctgtagaccagcatgtgggatccgggatcctgcctcacttcctggttgaacccccactaccccttactttcctgatgagccccaactccagcagtgaagcacttgcaggcccctgcaggtgatggcctgccctctgtccgtgcttggcacgtgctcttcactcaagggaaatgccacccctcccccactagccaagctgtccccagtcccaccaaaccagattaagtcactttctctgtgtttccaaagccccttggggttaccctactgaatagatttgtagtttgtttatgtgagtctcccttttcgcctagccaggtgcagaactgcagctgtgtcttgttcaatttgttccctctgctagggcagtgtgatggcagcaatcacaactgctttgtcctgggccctgcggctctgcactgtccaagaygagagcccctaagccacatatagccatttaaattcaaattttaactaattaaaattaaatgcaattaaaaacttaattcctcactcactgtagccacgttytaagtgctcactagctacctgaggctagcggctactctattggacaaggtagatataaaacagttttatcatcacaaaagagtctcctggatagcattttttaatctagataaagtattatctcttatccttagatcaagccgcaagaaattactattcccattttgcagactaagaaayttaggttcaatgagattaggagctaattgaagatgggaccaaaatctgaatagacggaaatatgactccatttccccaggttgcctcatcagtcctatttctacagtatggcgkggtgtatgccctgtattggtgtgaaattgctggcaactgagggaatgaacaaatgggtaatgggccaagagtgaacttatttagtcaaccttccttctcatatgaactgcattctgaaacttttacctaaccaacatattaaagcattgttaatatgtccttttgggctttaatgactcttcagaagtaaagtttcttcttccccttgctccatatacctctgctatgatttgagttctgtttttattgtagcatagacatccaaaagcctagcctgggagcaagttgaaagcaggaacaaagagaacaaagaccatggtcttcagcactctgttcctgattacttgcataatatcagtgcatagtaggtgattatgaaatgttgcagcctataataatttaaaaaattcttctactgaaaggtatattttcctttattatttttaggatttttgttttttggaagatgtgcagcattgcagacattgctaattaaaggaaacttcagtaacattttctgaaattctttttaagcattgtgtggaggctggaataaaatgccaaaattttgagtcccagccatgccacaattcctgggtgaaataagcatttggtgaatatgattgcttaytgcagcaaatattatgtctctttacatccattttctctcaaatctgaattcttttttgtagctggaagccaaacatctggaaagacaatctggctcagaaaccagttgctggagatgctgctcagtgtaatatcttccccccagcttcatctgtcctctgagtaagtagctccaggaagagcaatttggcaggaggttacctcatacagggtgtggcattaaaccttttcttaatgaaaagtttagcatctctgagtctgttttctgcaatgtatttcctgcactagtcagaaagaaaattatattctctctacccaatgaaccagaccttgccctaagatattmtgatgcaaatgttaagtggacatgagtaactagaaacagatttggtataattacaataaactccttttgtcaccatagctatagtgtaattgttattgttttggcagttgtgacaattactgattttgatgtcttgtacttggcagacaatagaatgaagaaatcgtgagcctaaataacatctatcaaggaaaagtcttgccaaattcttctgctatttactgttagtgagtttgttatttttccaagttggaaaaagaagtatctaccgtcaattaacttctaaaatcaagtgtaatcataaagctgattccattaactctccccactgcctgcctgctttacctccaaccttggagtcgttcatttgacacctaatttgttgagcatctactgcatgccagacactgttcccagctcctaggatgcagtgctgagcaagtcagcccggatccttgctcaacctgtatatgcatctgggcttgggggtaaagagttacccctcagtaaagcagctttataaatagtgtttaataatttaccagcctataaatcctttctttcttagaatcaaawcatggtagaactggaagatgccttggaaatgagatastccagccactttcttttccatctttttgaaagggaatgtagtgcagtgcctaacagctgggctctggcatctataccttccgggttcgaatcctagccctgtccccagggacccagaggaggctacttaagccctgtatgcctctctctactcatctgcatgagaataaaaattgtattatgttggtgaaaatgtaattgtgtttttttcattacttttaatgccaaaaactgccaatatttttgcaccaacctaatactttcaataggtgagtatagtaaagatgaaatgaattaatatatggataatcctgagaatggtgcctggaatactgtaaattctctgtaagctaattgctattatggccatctctttcatcatcaccatcaccaccaccatcaccattaccaccaccatcatcaccatcaccagtcttcaccacgggnnnnnnnnnnnnnnnnnnnnnnnnnnnnnnnnnnnnnnnnnnnnnnnnnnnnnnnnnnnnnnnnnnnnnnnnnnnnnnnnnnnnnnnnnnnnnnnnnnnnnnnnnnnnnnnnnnnnnnnnnnnnnnnnnnnnnnnnnnnnnnnnnnnnnnnnnnnnnnnnnnnnnnnnnnnnnnnnnnnnnnnnnnnnnnnnnnnnnnnnnnnnnnnnnnnnnnnnnnnnnnnnnnnnnnnnnnnnnnnnnnnnnnnnnnnnnnnnnnnnnnnnnnnnnnnnnnnnnnnnnnnnnnnnnnnnnnnnnnnnnnnnnnnnnnnnnnnnnnnnnnnnnnnnnnnnnnnnnnnnnnnnnnnnnnnnnnnnnnnnnnnnnnnnnnnnnnnnnnnnnnnnnnnnnnnnnnnnnnnnnnnnnnnnnnnnnnnnnnnnnnnnnnnnnnnnnnnnnnnnnnnnnnnnnnnnnnnnnnnnnnnnnnnnnnnnnnnnnnnnnnnnnnnnnnnnnnnnnnnnnnnnnnnnnnnnnnnnnnnnnnnnnnnnnnnnnnnnnnnnnnnnnnnnnnnnnnnnnnnnnnnnnnnnnnnnnnnnnnnnnnnnnnnnnnnnnnnnnnnnnnnnnnnnnnnnnnnnnnnnnnnnnnnnnnnnnnnnnnnnnnnnnnnnnnnnnnnnnnnnnnnnnnnnnnnnnnnnnnnnnnnnnnnnnnnnnnnnnnnnnnnnnnnnnnnnnnnnnnnnnnnnnnnnnnnnnnnnnnnnnnnnnnnnnnnnnnnnnnnnnnnnnnnnnnnnnnnnnnnnnnnnnnnnnnnnnnnnnnnnnnnnnnnnnnnnnnnnnnnnnnnnnnnnnnnnnnnnnnnnnnnnnnnnnnnnnnnnnnnnnnnnnnnnnnnnnnnnnnnnnnnnnnnnnnnnnnnnnnnnnnnnnnnnnnnnnntcatgtttcttttttttggtgctaaaactgataaaaatgcataaatattgaactatgccatttagataaattttgactagtgtctttaaaaagggaggggaatattcattatgtgttttatgtgactacattgatggtaattaaattagatgggtggctagtcatccactgtgtaagtatgaatagtagttatatagggctattaaggggcatgcgcatttttacctatatgaatacacagtttccaattgcttcaaaatgctgtggccaacttacactgcaaccattaatagacaaatgcatcatttgcacaacaatcttgccagcatttyattttactattctttttaaatgtaatacataataagtgatgttaaccttaacttrcctctccttggtgacttgtaaggctggacatttcatattttctggacatgtcactcgctcatggactgagagaacattggttgcatttattaatccccaggtcaaaggaagagatgtttctgaaactggggcctgactggttcctgctgctcctgcagggccacctgcatgccagcaccactgtgctggcattgaagctgctgctgtactttctggcaagcccctccctccgcacacggtttagagatggcctgtgtgcaggatcctgggtggaacgcagcactgagggcrtggatattgtaatgggtgagcacgtggctgtctccagggagtggggcaccacctagtcctgggawgtgaatgaggaccaagccaggccccttcttatttgagaccatcacagctctgtgcagcaggatcacctcgagccctgactccaaggcctacatccaaatgagcccagcccccctgacatcctttgcaggatcccccgcagcctcactgcacagacactggaggctgccttccattcctcccacctgcttagccctgttctcctgggcactgtatactctgcttcctcttcctgaggggatgcctcttctcctgatgtggattcatcctgagatctcagttcaaatgccacttcctccaggagatgaggggtctccctgaattgggacacctctgttatattatctctgcccttattatttttctctttagtgcttcacaaaattcataattatttgagtatttaattgcttaatgtctgtccctcccactacaatgcaagcttcatgagtgcctggaattctgtatatttggttgaaaccctacacccttgttgcctaattcaaagctgccctgttgcctcctacatggtgggcagcaagtatgtttttgagtgaatgaatgagcatgtcaggaacagcaaagggaactactgttgagtgccttcttgctcccatctatgtgtgaatatattttatcatccagcatttctatgggatgggtgggtggccgggtgttcctttgtgtgtccaggccccaccttgaccagcagctgttctcagctgacttttgtgccccctttgcctgatcaatagacaacctgaagagccagtcaccactgcctgagcaaagcccatgcctgcttcctgggttccgtgtcttgaatgactttctggcccaccacgtccacattccagaggtctacctcatcgtctccaccttcttcctgcagacaccactcacagagctgatggacgggcccaaagtaggttttcagagcacccacagggtgacacacttggttttctgattccacatgactaaggcaggtcgccaagaccctctgcacttacctccctctgcttcttccagctcagatggggtgctggcccacttccctccctagcagcccacacccttggccagcccttcaaatgctccccttccaggcccttgacttcctcggcctctgctcccatccttcctcccagcaagtctctgatttggatcagttctattttaaaaccttccttttgggcacagctaggggaatgacatgatgctggggtggccctgccccagcaccccagcccctcatcctcaaccacccacttaggtcatcatcttcttgcccctgttgctaggacagggagacttttcaaggctggtcatggattccttcagmtccttccttgggtgacctcatcccatagttatcctttctttctttcttttcttttttttttgttttttttktttttttttgagacagagtcttactgtgttaccctgggagagtgcagtggcgtgatctcggctcactgcaaccgctgcyttmtgggttcaagcgattctcccacctcagcctcccaagtagctgggattacaggtatccaccaccatgcctggtgaatttttgtgtttttagtacagacagggattttccaagttggccaggctggtctcaaactcctgacctcaggtgatccaccctccttggcctcccaaagtgctgggattacaggcgtgacccaccgcacccggccccctttcttccttttgtattttcagtttttccttttctaccaacccgttcctcataagccataattatgttcagctgcatcccacctaaaaccagaggctgccccttgataacactcctgaccaaatgctgcctattgatcactttcctatccttccttggccacatttctccaaagaggagtctgtgctcaccgtatgcaccttctcccttgcactaaattcaggtgactttcacacctgcagcatcaaggtcagactccatagctggcaccaagccccctcatctctggctgcctgatgtatctttccaacccagctgcaattcacccgccctcagctgtgagtctcctaaatcatcttcagtaagactggctgctctgtgctcacccaccctgctgcccttactcactcctctttcccaccatcgtctgcctggtgggagtgtcctccctcagcactcagcttagatgctacttcctacttagacccccagacagaggagaccatttcctcctttgtgcctcagtgtagtttaccctatatggatggcaccaatacaaatgtgtgcctgcctccttagaaactgagcccctgaagaacggacccacctttcactcaacttcctggaacctgacaaatagccaacttagaaactatttcttggtctcaatcgagttgagttaaacctaactgaattgaaatatgggaggggcgtggctttgccaagagaaggttaaaaaatctacccctcttgtatatctttataattgacaaatctaaatattgacatatgctaatagcattgtatattacacttcaaaataaagtttttaatatgctgtactaaggtcattgataccctgagtttttatttctctaacatatctcaggaaacagatgtctgctaagtgttggaacttgtgatagatgttttacatattttattttgcttgatatttaaacaatcccatggggtagataatgtaattctcatttcacagagacgggaaatgaactgccaagaagctcaatagcttgcctgagctcagctattaaaaaggcagaatcaggccatcctgattctaaaccctaagtttagaatctctctatacctctacatgctgaagtttcccctgaaacctttgaattctttatatgtcttatataatctaatttacaaaagttaattaaagttgattagcatatttacttatgatgtcagaccaaaataactgaactacatgccagtctctaggggatcttcagcaccttcttggaggtgcttgtttcccttatgcaccatctactggggtgaaattgttcctatggatcaaccacctaggctgccagtgtgctcttttgcttttcccactgggaacccctggaaacatgatgaactggctgcaaagctcgttctcttggtgagtagccgcaggtctgcttacagctcctgcctcctcttccaggacagccttgatgccatgcttcagtggctcctgcagaggcaccaccaggaagaagtcctccaggctgggctgtgcacagaaggtgccttgctcctcctggaaatgctgaaggccaccatgagccaggtgagacccattccccacatgctgccccgaggaggttctgatgggaaggccagtttggaagggtcaccttgacttttctcttagcatcttcccactaatgcaagtaattagccagatcctgtagaagaggtgaggtaagttcctagagtgactcaggggcacaactggaaacccagcctataggtctctgagctttatgtgctcttgcaggtgatacctgtttatcatttgtttaagcatgggatttcttcactggaagatttattgccttcagtcaaagggaacatttcttaggaggaggaagggcctctcctctcaacgagtccatctcctcgctcatgagtgacctggggaagggacctgacttagagaaggcagatggccgccagctacaggcagggcatggagtcttcgggagtgagaagcctttaatttgagccttcaaggtccagtagaggtgggtggtgagcagaagagttattttagacattgggtagaggccatgtgacttgtgaacaggaataattaatggtaagccaggtcagggagggtttccagaaaaggctgaaaaattctgacttcatcctgtaggcaccaaaggcaattggaggcctgattgtatggggaaacttactgcttttgtaaaatgatacatgattacctttaacatttaaacaaaagggaaaaacagaaagtaaacaacacccacctgacacacacccacccaaaaatgagcactgtgaatttggtggaatctttccagatacttctccaagattcgaccatatcctcacagaggatgagaccacatgtaccccttttgcctttttttcctcaatatttgtggacctcttctcatgcaaataaagtgaaaaaacatggtaatcatttgtatttgtaatggaaattgatgttgttttacagagtgttgtttgtaatgaactttcttaaacaaatatctttctttctgtcttgatgacctctttagtgtattctgggatgtagtatagcaggtcaaagtgtgccttcaggcgttttcttttggatgtacttctcagaaagattgcattagtcattatgcatacacatcccaccagcaaatatctaactccttatcttgttcagaaggactcagccccatcctcacagcctcaacatcatggccaaactgatgatggcttcatagttgagttcttttgcatttattatttctgaggttgaaatcatttttcatatgtttattagctatctttatttattttcctctctctctattttcctgtcaattgcctgattatatcttttgccagtttttctgggtgtgtgggattatgctgagaaagtagagatcccactttttgccctttttgaaacagattttttttttcttttttgagacagggtcttgctctgttgcccaggctggagtgcagtggtgtgatttcagctcactctagcctctgcttctcaggctcggatgattctcccacctcagccacccgagtagctgacaccacaggtgtgcaccaccaatgcccagctaatttttgtatttttgtagagacggggattcatcatgttggccaggctcagaagtgtttttatcgttattattagatacccttttagcacacagttagataatcctatgctttttttttttcttttagccartttcctatgatgaattacatcaatagatttctttgcattctttcaaagacctcatttagtcactctgtccttattctgtttgtattttctttatgatttcatgcatcctataaatgatattagtctgcaatttagtttttgttgaaaaatatttttcaggttttgacatcagtattatgctaatattatataaaaaagacttctctcctttctttgtattcagcaagaygttaaatccatgatttttatattattttaattgttcctatgaaattgcctggacctaaatttgtcccattattattggcttgtttaggcttttaaatgtcttcttgacctagtttagttaattaatattttaaaataatttcccattcatttaatttgcacaaatggtctcctttaactcatgtcattttctgtgtgattgtttctcccttcgtattctcagtttgtgtcctgctttctccttcttggactctcttgtgacttaggagttgaaggcttgtggatttatataaataaccagctcttgggtacatttatcagtctcctgattttatttctgtcaatttctaagattttgattttggcgtcttcattttttgttatgttctggaatttctgtgactgtagtgttaaagctctctttgattcacattttctaatgtccatgtggtgaagatttttggtttttaaacttttgttctctatttctagttatgttttggccctgctcagatcatgtgatctgtatatttttcatcttcaagaaatttattcatggttttattgtaggcctaatgagcaattaatttaggggtacctgaaaagatgtatattttctgtatggagcataaggaatctgttacctgtttaatcaattaatgttattcaaaataaagcaaacaaaaggaatcacatgcaagcatttaaaacaaagaaaatatgtaatatgctgagagaagtaaaaatataagaccaaacatgtatgtcataacagcaaacataaaaaggttaaatttctatattaaagatgtgaattttagacttggtgraaaacaagactcagacttctaagatctaacatgtatgtatatacaacaataacaaagttactcagtgagtttggtacaatcaagatctgtgtcaggaaagcatcatctacccaatacagtagacaagtatcaaaaataaaaggcagaaacttaaaagataagagaaaaaggctaggggtaaacatagaacctacttcagagggttgttgtggggtgagaagaggcatatgtatgaagcccttacaacgtctgcacatattaaacccttcctcaattggacactagtgtctggtgctaatctgcagtcttaaataatgtatcttgttgaaagtctcaggaaggaatcttctccctagacctcagctcctctggttagggaggcagcgcccatcatgctgccctgcactacctctcaccaagtgtgcctcagcccctggcaggttctgaggatggtgcctgggcacagaccttcccggccagcgtgctgcagttcctcagcctcgtccaccgcacctacccccaggacccagcgtggcragccccggagttcctccagaccttggccatagccgccttccccctgggakcccaaaaggtaggacatgctgctgtcccacccagagagagcagttgtgagcatcatcatccttcaagggcaaagggcaaaatccctcccctcccccctaaaattaaaatacattttaaggcaacttgagcggaacattgaataagcagcttggataaycatccttttttggctgagatacaccttgaggtcattttcagctctgagattcaataatttttttgagctgttaagaatctcagtaatgagaagtctaatggcagataaagtccattgtctgtggcatacacaggcactgacaaggggagacagtgactcccattccaggaagtctgctgctgtgcaccacatgggggagggcagtcctgggagtgcatcctgcaaaaacttttgctcttgggaaccctcatccaacttgcaggcccctgggccatgacttgtgtgcccttctaggcagtgggtttgcagaggcccagcttagagccagacaagccaaggggagggcagagcctgatttaaggatgaggtcttgggtcttatgctctgggggttagagaaggggctatgggaagacatgtgagtttgaggcctccagctaggcccagcaggtcaaagcttggctgggtcagggccgtgtgggactcaggtaggctaagacctcctgggagctgggaagcgagaaggaggtgaggactaaagaagaaggtcaggtatggaagaaggaagggcagaaattcacacaaccacccccactctggtggattaggaagtggagacccagtgagggcaagtgagctaaccgtgtcttcctgcaagttgccaactgtagctaaaggagcatatttgaaaggtgagcaatgctacataggggggtttataatccatgccaagtgtgatgccaggcctggagtggttgctccataaacatttgctaagtgcccaaatgaatgagcaacatgctctcttagctaatcttttccagaagcatacccatggcggcagcctccatctcctgaaactggtgctttaraaaacctgaattgccacctgatgaaggtggtgtctgagaggggaagctgagattcagagaggcaaagtggcactcaccagtttcctccaggctcactgagggtcacaaaacccatctcccagattgattgcaagaatgaaatgtactgaacttcatgcgattaacaagagacggagccaaagtttaaatctcactcttaccccaaagccttgtccttttcattacagtcagtttaaaataaaattaaatggccaaataaactttaaaagtagttttaataaaaagactaaatataaagaccagaagtttcacaaaaagataacatagttttgaaatagtttgatgaattcatatcaagtaacttactaaaaaagtaagataaaaaagcaaacaagagtgaaggaatgcagcgttgtttgcaggagagaggtgggataggacccacagccagaggcgcaggcagcctggccagggagagatcaagggcgagcctacaggctccccctcgacacttccctgggcaggttttctgcaggggtccagcggcctaacattctctacccagatgcccagctcagcccccatgcccaagggccaggctcgccatctgctgagtyggggctccagccgagtgcccccgccagcagcccaggtgcacactctgacccagggctcctgctccccatggtcagcagttcctgcccaggggagggtctggcccagagtcacatccccagctgatcgcgggcgaggtcgggcttttgtcttggggctcctggctctaattccaaggtgtacctcccagccatccttgcctttttcagcgctccaagtcagctctgccaaggcctttgttgtatagaaaacatgccagaccctcttcatgcagaaggctggtggccaaaggcttggatttgctgtgaatttatatggcatctttccaatcaaggccgcacggagctaattaatgcagtcactacctccctaggtgccattaaattcattttatggcttaattaagaacggccgcattaattttatgaatgagcaaagggaggtgctaacagatgaatgcgcaggagaagttcacgggctgggagtcaggagtccctggccgcgtgtccttgggtgagtcattcagcctccagcatctctgtgtcctcctggacgtatctggggtaatgacccctgtctcgttgatctcccaacattttataaatataaaacaaaatagtggatgccaaagtgcttcagaaattagaggaaagaactctttggagtcccacttctccacygttcttgcctgaggagcctgtctgtgggcatcagcagagactgggcaggaggtagaggtggggtccccawcacaagatgggcaccgactctctctgactgtctaccaggggctgggcattgccacgttcgttattctctcatgtcattctcccagatccggtgtcagatggtttttattgtctctatttaaccgatggggagctgtggcttggagatgtgaagcagcttgctcctggcacattctggagttcatcatgaacactgcaggcctctctgactctgtggtttagcttctttgcacaacacttggcatctcatattctcaaacagtagcrggccactttatgagcagctggatcctgggcaagttgctttcctgtgcggagcctcaatttccgtacatgtcactgggcatgacaataatccgcccatgtacatggcacaggttggtgggaaagagcttgaggcagggcaggccactcatgttggggttctcttgtctttgagggggttggggctgagtccacccggaacacyagcagtcctgaggccgcagctgaaggcgacagcacagtggagggtctccaggctcccaccaaggcacatcccgcccggaggaagctgagggagttcacgcagctcctcttgagggagctcctgcttggagcctccagccccaagcagtggctgcccctggaggtgctcctggaggtgggttggaaaaggtgacattgggccatgtgctgtggaggctgccggcataccggcactgcaagggcaggatgcacccagggagacagagggcctgggggccacagcgagtgaaggggaatctgtgaaccatgggccccaaaaaagcaacaggtgatagaggagtgagcacagagtccctagaagcagagcctgaggtgggagttttgtggaagtgagttattggccagtgggttggaggcggtgttctcaggagaagcagggagggaagcagaggggcaggaggtgaagctagcccagaggtggtcccagctggagcctggcccaaggggggttctggggtgctctctgcctcccagggccggccccacctgtggcacctgacaggtggccgtgggctgtgggctcccctgacttgcctccttaccctcggaagtgggcgttgcttcctggatgaggcagctcagtcacagagggtgggcccccagagaagggaaaattgtgagcagcccacactgctggcagatgcggcataagtgtcccagccaggctagggaggcggtgggcactgggtgcacacgatggccctgtggttgctgtctcagtcccgggctgtgcttccaggcttctccagaccacgccaccagccaacagaagcgagacttccagtccgaggtcctgctttctgctatggaactattccacatgacaagtggaggtgatgcagygatgttcagaggtgagtggggcaactcggtcccctccattcatgacatgaggctgctgacagtggaraggaaaccagcatgctggccaggaactgaccctagctgtgggatgctgcctccacctggcgtcagtccctccaggcatcatcaacaagaactccctggctcctgccttggggcccagtggaggggtgcttgctactttccatgacacccttgtcatgctgtgccacttacagacagaaagcccktttgcctctaagcaaaaatcggctctcctgtagcctcagtagaaatgcaacctcttcccataagggaaaccaagataccacaatttaaccttccgtgctcagcattctgcctgggtacgggataggtgcacagctgatgtttcttaaacaatgaacctggatgaagatgctgccatgccccttcagagcttaaaattgaaggttcattcaaaaaacttggttccagggcagctgtaccttttcracaagcctaaacaaaagccttttctgtggttcccaagccacaggaatccctaggaacatgagtcctactctggacttctccttgcctcctactcagaagccctgacttcatgatccttctcatggagagactggaatgcaggagagtagcagggtggtgaagtgtgggtttggcaatcccagttctggacttggctctgccactggacagtcatgcgaccctagtcaggtgcctggacctgtgagtaaggacgacagtcgtggtgaactcacagggttgtgctaggggttagttgagatcatcacacacatggctgarcacagtacctgctgtgttggtgagcatagatggataatgacagtatggctttatcctctgcctagtgtagcagcagggcccctggtcatcatgrtgcctgctcatttgtctcaagcagcacattctcccccatcctcctccaaaaagccacaggaagaaatgcttcaccttgcttgctttctcaccacttggtttatgtcgctgaccagattactcaasatctgttcattttgattaaatgtgtgtgtgttgggcacctcrtcagtacaagactccatctttggaaccatggggtacacagaggtgaataagatgcagttggtcactacagggggcttggagattgtcatggacagaagtccatttagactctcacctccacctgtcccctcactccacagacggcaaagagcctcagccaagtgcagaagctgctgctgccccttctcttgccaacatctcctgcttcacccagaagctggtggagaagctgtacagtgggatgttctcggcagaccccaggcatatcctcctcttcatcctggagcacatcatggtggtaagagctgctcactgaccgggtatctgtgtggatctgaatgatgtgctcctggctattgtccagttggttccactggatctgccctccctccctggagtagaatctgagccaggtgggaggaagcaggaggccctttagtcccagrtaatacctggaggctactgcatgtccagcagggctctcacctcaggccccctgagcccagtcccagggattggaagcctcagctccctgcacttgcacctgagctctgtaaactcctagaacctgcttccttcyctttgggtttttattgtgattgttggtttgaccttaattgttattatacctcctcagctaagaaaggrccacaaaggcctttgtcttcacaagacctattttattttcttctttaatactcactctgttgtatttgtgccttcctgcagtggagacaggcatctattttaaccttgtctttttattcttgcctgtgccctttctttccagataaacaggtatagttacatacctacctgtacaaatgcatacctgtagggccatcattgaatgtaggtgtatgtatgtgcatgcatatacacacagagagaatcgtacaatctcaaaattccagcattgaaagagaccttttttttttttagatctcagccccattacaagctagagacttttcctgacaagcctccaggaaacctttgctcaaaccctccctgtgatggggaaccccctaaaattcaagttgtcccacccagggggatgtctgtgattcttggaaagaactttctgttatcaagctgggatctacctccagcaactcctgccagcagtcctggttatgccctctgcagcagaattaggaggaccactctccttcctcttcacatctcatagagagtgaaattggctcccagcacccttctgactgcagagtcacccacagacctcaggactgggcctcttcacagtttctagagccatcttcacttgtctgatgagcaggtccaagcaaacctggaaagacttgaattcaaaggcttcttcaggaacaactccaagagaggagaaatagcccttgtcagctctgtgagggttaaaatcagattcctggcaagttgtgttgtaaatggaaagaagctgctgagctccctatggctaaagcatggactcccagctaatatcccaaacatagrtgccagtgggggccaccgtgctttcagggggaccaggcctgagggctcggctccccacatatccaccagcctcctctcttgcttgctgtctgtgatgcctgcccctcttaacctctgtttgagacccatctgaggagcaggagaggaacatgataaagaaatgaatcccaaaccccaacaggtttaaacagaccttcacttcatgagtagaaacattgcgttacctgtgaaattctaagggagtagcctataacaaattcattttctatcggactgaaaaactttgtgcatactctttgtattatggattcttttcatggaagccaaacagatgtttggagatgtatggaccagtccatgctaaggctacaaatcagggtcttctacttctccctctaagtttcttttgaattaaaatcttctggactccgtctccagtagatgatatggtggttaagagcgtggcttaagtgtccagtgtgtgtttgacccttgctgaaccacccagcctctctgacccttagcctcttatccgtacagtggggtaacttagcgtctatggtgtttttatgacaaacaggcaatatatgcaaatctgtgcaaaatgcttagcataatacctggaatactataagtattctatgataaccattaataatgacacatagctattttttaaattagatactactaatagcatgttctcatacattgaatgtcaatcatgttaccattatttcagaaatctcgggtcaccaaatctattttctgtaatatgactgtaacaaactttcaactttttttaacacaaattttcacccaaattctgcatagccttgattgatcatttccttaaatagaggcttgaaagtagaggaaatgagtcctattagaatttcaggtcatgtcaatttttttttaaragacaaagttcctgccctgtcttccaggttggagtgcagtggcatgatggagtgcagttcacctcagcctcgaaatcctgggctcaagcaatcctcccatctcagcctccaagtagctaggactacagacatgtaccaccttgcctggataaatttttttttaactttttggaaagatagggtcttactatgttgctgcccagactggtcttgaacacctgtcctcaagagatcttcttatcttggtctcctaaagtgctagcagtacagatgtgagccaccatacccagccatgtcacttttatttttatttccaagttccagggtacatgtgcaggatgtgcaggtttgttacataggtaaatgtgtgtcacagtggtttgctgcacctatcaatgcatcacctaggtattaagcccagcatgaattagccatttttcctaatgctctccctctccccaccccacccactgacaggccccagtgtgtgttgttcctctccctgtatccatgtgttctcattgttcagctcacactttaagtgagaacatgtggtatttagttttttgttcttgtgttagtttgctgaggataatggcttccatctccatccatgtcactgcaaaggacatgatctcattcctttttatggctcatagtattccatggtatatatacaccatattttctttatccaatctatcattgatagacatttgggttgattccatgtctttgctattgtgaatagtgctgcaatgaacatacgcgtgcatgtatttttgtaacaggataatttatgttcctttgggtatatacccagtaatgggattgctgggtcaaatggtgtttctagttctagatctttaaggaatcaccacatcgtcttccatgatggttgaacaaatttacattcccaacagtgtaaaagtgttcctattgctctgcaacctcaccccatctgttgtttcttgactttttaataatcgccattctgactggcatgagatagtatctcattgtggttttgatttgtatttcttgaatgatcagtgatatggcactttttttttcatatatttgttggccacctgaatgtcttctttggagaaatgtctgttcatgtcctttgctcatttttaatggggtcgtttggttttttcttataaatttgttaagttccctgtagattctggatattagacctttgttagatggatagattccaaaaattttctcctactctataggttacctgtttgctctgatgatagtttattttgctgtgcagaagctctttagtttaactagatcccattgtcaatttttgcttttgttgcaactgcttttgacattttcgtcatgaaatctttgcctatgcctatgtcctgaatggtattgcctagattttcttcgagaggttttatagttttgggttttacatttaagtctttaatccatcttgagttaattttcatataaggtataacgaaggggtccagtttcgattttctgtgtacgtctagccagttctcccagcaccatttattaaatagggaattatttccccattgcttgtttttgtcaggtttgtcgaagatcagatggttgtagatgtgtggtcttatatctgagttctctattctgttctattggtctatgcgtctgtttttgtaccaattctgyacaaaaacagtacactgtttggtaactgtagtctcatagtatagtttgaagtcaggtagcatgatgcctccagctttgttttttttgctttggattgtcttggctatatgagctcttttttggctccatatgaattttaaaatagtttcttctaattctgtgaagaatatcaatggtagtttaatgggaatagcattgaatctataaattactttgggcggtaagccatgtcactttttgattatactatttttgtggtaaactggatctgtatctaaaattgtaaagcactcacaagtttgtgtatgtgtatgtttttttaatgacacaggtcattgagactgcctcttctcaaagggacactgtcctcagcactttatacagcagtttaaataaagtcattctttattgcctatccaagccccagcagtccctctccgaatgcctcrgccttctcagcatcctgggctttctgcaggagcactgggatgttgtctttgccacctacaattccaacatcagcttcctcctgtgtctcatgcattgccttttgctactcaatgagagaaggtaagagctgcccacttgtttccttgtctgctggtggtccatgcagaaaggagagatttagaggaaagcttgattgaggactgagttctgkataaatgatatcatccttttgtttatctggtcttccatattttgtgaaatgtttgataacatggtaagtaatccccaaacttgtccatgtgacagcagttagaatcatcatgagataataatttaccctatttccacaattctaggattgtaagataagtcattgatttaatttttgaggcagaaaatgccaacattagatgtacacattgattttgtgatgcagccagactctagaarcattatcatttgataattgcaatcttagaaaggaaaaaatataatacattgtattgtgcaatgcaggaataattttgctttcaggaaaaaaattacatatgcatacaatgtatgacataaaatcacatccataaaaatgctagttaaaaagctattaaattaagcttatttgagtccttttcttgaagccccaagtttggaaatacatcagatttccaaatctgaatgtggttcatgcacactgacacagagagagagacaggaattatgttcactttctgtctctctctctccgtgtcagtgtgcatgaaccacattcagatgcgtcacaccgttgtgctggctgtgagtatgatgtcttatgaatagagccgtgagagtgtagagggagagaggacaatgggatatcacactttgctgttgtcctttttcttcattttattcatcctaacaaaaattatgtttgatcacttgaaaaaaaaacaatcccccacatcctgtagtgttgactactgagcagtacaaaacactagcattgacttctcataaaactctctgggaagccctgggaaaccctcctagcccagagaggcacttgtctttgtatgaaagaaaataatccattttcagtatgtggtttaatttggggaagttttttttttttcttcctgtttcaagagttaggccttgtccatcctggaagcacaggtaaagaggagcagaatgacaactgaattatatgcttgagatgataccctcctcagttccctctgtttagcaagattgacttcattctagaaatttcaaacatgggcattctcatatgtcaggttattttcctttccatgtttgtcattttcagttcaatccatgaacatttactgagtgtctgtttggtttgtgtcataatggccacgtggacgttaacacaatggggacccccagagcacatggttcatgggaaacctaatgtataaaccactgtgtccccacttacaactggctacatcatatgtgaggcctccagcaaaattaaaatgctaggcttgtgtccaaaaatacccaaaatttcaagatgatgacagcagagccccaaaaaagggttcttctaagtgcagggccctgtgtaattgcacaggttgcacgcccatgaagccaaccctggccccattcaagcaggatgaaatcaatgccaaacaaaggcagggttcaattctttgggaaggcactgaaagaaatgactagttttgatggcggggaatcaggagtgggcacagggggactgctggcagcacaggtgggatttcacaagacttctcataaggagaaagtgtttctcctactattcagaatgccactctaaaatatctgctgtggaatttcttataaagtgtttgctttaatttgattaggcaagtttttttccatattgatatagataattattggaggatgattatttgtaataaagaacaatagaatggtctcaaggaaactggaatttattggattttagtgaaaaatctcttatccactagttacccagaaggatttggattggagcccaagcctagaatgtctacttatcatcaagtcttcctttccccaaatgaagacgtgaaagaaaaaagagaagacttaccaagtttgagtgatggtacattttatttgtcattgtgtgtgtgggcggggggggggcggggagggggtggtggcaggatagtggtacctgctagggttgcattcttcagttcgtccttcccgaaataagaaagcagatactattaaggacattttcaaaaagccagaagacttaggaaatcctagggtaatcatgtattagtatatagcaaggcaagctggtagaaagtaacactggattggtctttgtatactagaaatgaaatggaaaggaatgaatcgatgcataggtgaagagaaagctccatgggacttggtttgactagaagcttaatcccagggtactctacggtaaattaaaactgtcactccccatctcacctaatttagttcaagccattacctagttgctgctcagcttcattccctagtaaatgagaagggattaaacaaacccattactctctataagactttttgcctaatggagtttattcttggatttactaatctcaaatcaagttaaagggattagcagttatttttctagcagccagttctatgtgtttgagagattatgctctctcttggtctaggaagcagaagctctgccactccttctgccagtctggtttgcagactgttacacttacctaktcatatgttgtaatacaagattgtacacacgaccaggtgcagtggcttacacctgtaaccccagcactttgggaggccaaggcgggtggatcacctaaggtcaggagttcaagaccagcctgcccaacatgctgaaascctgtcactactaaaaatacaaaaaaattagctgggcatagtggcgggcacctgtaatcccagctactcgggaggctgaggcaggaaaatcacttgaacctgggaggaggaggttgcagtgagccaagatcacaccactgcactccagcctaggcaacaagagtaaaacttcatctcaaaaataaaagattgtacacacagggcctctgtgttctggtcaggtagctgccatgctcaaaaatctcgtgactttgaagtttgttggacatggttttgattacaacacagaggtacatactttgggacttggccagtagagctgggctgggcactgtccattcccttagggtgagagaaacagtctccaggggctgttaccagagaggggactcattggtccaagatcagagaaaatttaggcatggttcaggggattacagatgtggggcacagcagacacagttggtttgttagatctgcttatacctgaagaattccaggggactgaaatgggtgggtagtgagaagcaaggtccaggaaagaggacaggctgttcctgagccgtgagccacaggatagtcttgagcttggtgtccattcccctgagaggtcaacatgtaagggaaggttggaaggagctgtttgagtggagctatttgactaccctgagatcacacaaggtgtccctctggtatccaacagaattatggggtggagagttgagggtctctgagctcataaatgatatgtttcccagtcctggacwtgtgaggcaggcaggaattggtggtaagcaggtggaggtggagaaaggccagcttgcatgggtgttggtggcattgttgtcaggcctgtggctctcartactgattgcttctsgctgaagcttgcaaagctggggtgatgttcaagaccttaagtgagaagggtgtgggtaaaaccactcatgatgcaccatctcccagccctctctgggagggtcactgaggccatcctgaktgtgccatgtgctctctctgctagtccaacacaacatccagaagacagtgcagactctctggcagcagctggtggcacaraggcagcagaccctggaggatgccttcaagatcgatctctctgtgaaacctggagagagggaagtgaagattgaagasgtcacaccgctctgggaggagacgatgctcaaggcctggcagcattacttaggtctctatccactcggctccagggaatgggaactcctgggtctyacagagccagactcccgcaaggttcaactcagtgcctagagccttttccacctggaccctctgtctcatcccttaagtggatgggatttatatcactgaaatcttatgtatctttcctcacaaataatgaatatcacatggcaccttgggtgaaagcaaggccacaggagccaaccaagcaggaagattccagtaatttcttagaggaagaggcccatgtggaggctgtggcctgggctcaggaacttgaggttctaggtcctaccctgttatccacckaccagctttgaaacctttcactgtcatgcaatgtccttgagcttaggttcctcatgtcctgtcacttcatgaaatgaaagttttcatccccaaaatattaatgtcccttgcattctattctgttagtgacctcaacatttttatcatattagtatttggtactaataaacaacatttttgcatattagtcaatgcaactgcaagaatgaatttttaattttgttttcaaggtgatcactgctctcaacttacacctcctatacttgtacatcttycagaatcacaaaatgtgcagtgattcaagagttagttatttccatgtatattgtcccagactgtccagtggcccagaatctccttctaaattggctttataaattagtcctggcaagtgtatatatacatatctggttttgtccatttatgctgctataacaaaataccacagactgagtgatttacaaataatagaaatttatttgctcagttctggaggctgggaagttcaaaatcaaggtgccagtagatctggtgcctgctgagggctgtgtctggcatctgcttctaagatggtaccttgttgctatatcctctgtaagggagaaatgctgtgtcctcccatgttggaagagacagaagggcaaaaatggcctgggatggcccccttcagcttttttataagacactaattcattcatgagcgtagaaccctcatattttaatcacctcccaaaaggtcccacttcttagtaccaccacaattgggattaagtttcaacatgaattttggagggaacacacattcaaacgatagcaatacctryctactttcatgtacttttaaagtcaaaatgtcagattctatttcagagaaaagtaaaataggatatacatatccatgcacatagagtggaataaagtagtaaaactgtaaagcttacaaatgactctctttttgcccacagtcctatattgaatactttctatgttccagggtctttaaacacatcttatgtaatattcatgacccctcaactggtttagatattgttatccccatttcacaggatgagaaaactgaggctcagcaactttagttaatctgctcaacatctcattgtggatcaacaagccgtggagctaggagtttaggctaagtctggtgacctcaaagcccacagtgtttcttagccaaaggaaggtcagaagacggcagtgtgagcttgtagcctgggttgtttctctttttggaggcaaccacagggggctcatgcccctggctggccctttgaaagccaagctagctatraaaatagtgtgtgctctcacttcacctctgacattctttgcttccctkccctcagcatctgagaagaagycactggcaagtcgttcaaatgttgcacaccacagcaaagtcactttgtggagtggaagcctgtcctcagccatgaagctgatgcccgggmggcaggccaaggaccctgagtgcaagacagaggtgagcccagacccyttttcctcagaaaagtatcaggcatttgcttcaaaccccatgagtcatatctcttctttgctgcctgttactagacatgatctaactccacgtccttgtgagcatttgagggtatgcatgtagctccccagtggaggctatgtttaggctgtattaggctggctccttgttcccattctcaactggagtcagatgtattcagagggcactagcccaccactcagcagcagctaggggtgtgagcccagcaaaggtggacagaaacattcacttcattgccaggagacacagggttgggccactttgactgtgttgggtaggccctctttactgtgtggggcagacccgttgggrttttctaatcagtttctcaaaacctgcaaaacaagtcttcctaaaactcattrgcaccaacaatgtgtgtgtgtgtgtgtgtgtgtgtgtgtgtgwkagagagagagagagagagagagatcaggaacgttgttgtaaggtatatggagtacrgtgggtggggggacaggttatctctgccccacagtgtctggggcctcagttgggatcgttggaaggctgagttactcatatatctggtggttggtgctggctttagtctgagaccttaaggggggctattggctggaacacctacacatggcctcctcatgtgaactgggcttccttacagcatggtagcagggtttcaaaagataatggagagagagagctcatcaggcagaaactgcattaccttttatgacctagcttcaggagccatgcagtgtcacctccatcaagatggggaaaaaattctgcccaagttcaagggaagggaaatagactccaccttctcatgggggagtgacgaggttctgcaggaacatgtgggactggaaatgttgctgaggctcttttggaaatgcatgatctgtgatatattctaatgccagtgatatattctaatsccaggggcactgacttcttcagaggtggactgtggtttttgctagacatggctgtagggtcaggagaccttgggcagtttacttaactccccagtgggataaataactgtgagaacccagaaaggttccccagggaggtaaagtagacagctgacagacacattaacataatcccagctcttggcccatgaacttcgggaaatgaggtggagcctaaatcccaccagctcagaatctgtaactgcctgtaagtgcccaggcagccgaggaaaaggcctttcttttcccaggctttgggaatcataggcttcagggcctagaaagagtccagacatagaagggaagtccagaaatgaatggctgggctgaccagctacctgatgctaagagctaagggcaaagcacatgtcttattcaggctgtattctcagggaattgacttgktaaaggcactgttcaataagttcattgatagactcactgattgaatacgtgaatgtgtgagtaactcactcagattttgtaatagctgcatcagacaggtattatagccttgttataaaaatgtggaagctgaatctgaaraaaaaaaagaaagttaagggcttttcagtcattaaatgtcagagtgaagataggatcccatctttgtgctgctgaggaggaccttagggaatttatggaacctctcagagctttcattcctgaacttaccactgggaatatgctctgtttataatagagcatgtggagcccttggaagctgtaaatgctttagaaataggagactgtttacaaattccatttggccttctagctctctctgccaaggtcaagatcatccyataggtgatatgtgtaccaagtcctaaaacttggagcattcccacttgtgcccatatacctgctcctgaccagtgtcacttgagacagaaggggcccagcccctctttccttggcttcatcatggagcttctcttccttggccattgtccccaggaggtcaggacagcctggctgggagctagggaaggaatgttagggtgctgggcatgggcattcatctcatgggaaccctcacacctgttgatgctgcctcttgccaatgcccttctcccttcccctctagtcactctcattgatacagctcagctgcctccgagtcctggggacatgcattgagcaacagttcgtatgaaagaaggctgagtagaccrccatgtttagggccacataggtgtcccaagtggcttttaacagtttgctcttggctcacattgagagatctgggagaaagaatatccaaagccggctctgtcttgggtgagggcaggctgctgaagattttgtcttctatatccattgaggtcttattcacttgttcattcaacaaatatttattgagcrcttactctgtaccctgctctcagcattgaggttacagcagagaacaaaactgacatattctcttctctcaaggagctgcagtctgggaagtaagatagacaataagcaaatacagttgtaaatattgggagaactgatggcaatgagaaaaaacaatgcagggtaaggcagggagsggggcgagagaggggctgggcttgttcagatggagaaggtcagcaaagtcatctttggcaaggatgccttggagcagaggagataatttatgaagaacatgagctttgagatgctctgggaaagaggatcaggcagagaggacagttgggcaatggcactgaggtgcatgtgtgctgggcagcaaaggccagtgtggctgaactgaagtggagggagtcacccgcagccaccccagcttccaggcagccacggggaatgtctccctcaccttttagcaccaggaagaactactttcagcaactcaagaagagcagaaattttgcaacagattatgtttctgtctttgatctggacactcagaaactgagagagataagcatggttaagcttttgtaattgcwcacaactagtgggataaatttttgagccacctaygcatacaaatgcrtacatacataccctctccctggcttcattcttctccactgaccccactttcccttcaatttgattttttctttctacactttaaattatcytgtagattttaaaagacacattattttggaarcaaggactatgttttaayttttaaaattaactgcatctttgcttagcaacatcttgtactggtaactaagtcttggatgggcacagtgcctgctacacggtaggcccttaaagaatgcagatggaagtgcttagagcaaggggatagatgctccccctccttttgctgagatgaaacttgccagctttcagacactgcatccatcactcaactctgtgagatgcctttgtcgctaacagaaggcacaacttctcaggtacatatgtacactgtgatgtcataggataagagcatcaactatttgccctggggtctgtttaattatttttaaaaattaattttgattattacagctgattacacctcagtgagcaatgtaattgatattttctaatgtatcccaaggaacattttgtacaacatgctttttgttgttgaaggttaaagactccgttattggtttttccctaaatatgcccacatcattagtccctccagtgagaaggtcgccatctggaaaaagcagcacggagacattattcaggcacaagtgcatgaaattggggtttctgcatcttctgtctctcttctggaaagaagaggcttgtaattaaaggagttggtgttggaggaaacattattcatttggtgttattccttatcatgtcagcagctgatagccctatagcactgataaattgttccttggagtgagacatatgatatagaattcataattcctcttacctatcttcattttcagtagaaaatgttttattcctggtgggtgagctgaactttgaggcagggctgatttgatagatgttatttcttcttcttctccccctgaccccatcacagtcccctgtgggagcaaattgtgacatcacccactatctctagaaggctgtgagtgtcagcttgttggacagagrttgggaacttggactcccttgaggccaccaaagggcaactcagggtgcaggccactttctcatgtccaccatctgcctggagaatccagactgcacagggtggccagctcccctcttcacagccgtggattcagctctgcttacgtactcaattccagacttccttgtttaaaaacagctgaaaagacatcaacaascaatgttggtttcttagttttgacaggtacaccatggcaatgtgggatgttaataactttataggaaaacaggtgaagggtagatgaaaactctctactatctttgtaacttttatgaaaattgaaaatattctaaaatgcaatgtgtgtcatcatctgtttatataaaagcattagcaatcagaaaatgtgcataggagtcagggggctggaagctggttaggaaggggccatggaggaggtgacgcctagagctgagtctgggaggaggaaggtcaaagcctgtgcagaggagagctctcgggcagggagaaggccagagacataacaggtggtaagaaaggggccaaggcagtgggtaaaagccaggtcagggggtaccacaggccagcctagacactcatgtttacctgtaggtgagaggttaaacagagkcatggcatctgctcctataggtgagattacaggtgagggcccctggtggggagccaaactgtgggtgacagggggctgtagtgtgattcaggtgggagatagtgggggctgcagtagctgtagctggagtagtgaacagcgataacacacagaaaattctgttcaagtgaggctgggacaggtgagaaaagagggccacccagggcaggcctggctctgagaagagacagcacctgggggtgggaagtctggcattcagatggctctgtgggattccacagagagtggagaaaaataagaaccagaggaatggggttgagagtacaaggtgacttccagcccttaaaggggtgggagcctctctgggcagccccyracctgtgtacatagagcataagctggatttcagcccactttcctcctgggatcaactgtatacatatggacagctatcccaggcagtgggccaggcaggccccatcagaggagggggacccactcaccagcctgccagcaaagattgggggacttatagaagaacaggattcacacggaggagggcagagccctgtgttccccacaattccatggctttaggagatagctgagcaagcttccagttgctgttttcaaagccaggtattagcaaactgaaatggcccatgcagggaagtcagggctgtgtaagaattaacagaatgggatgagagggcaccagaagcgtgaggatgatccgctggaattgctaaaaaaagcaaaagctttctgtaggaattctacatctgccctggcaaggacagggaaacattagaagtttgcctcacacctttcttgggggtcccctaaaggctgccctatgagacctccaatgaaaccagcagtgcccaccattgggcgccttggagacttcagaggcagggcacttatgtgggcagggtgcctggggtctgccatcagctccttccctgaccaggtgccagacctgccgtcacccaccctagcatgaagcagctctgccccagcagaggacaagatgctgactgaggccagtaactcagtgacagctctgttaagggcagctctggctgaggtcctcggtgagggaaatgatgtttttgactatcccctctgagcacttcacccattatctttttgaaaaaaaaatcattgtggaaattctcaaacatayacataagtagtaaaataatgtgatgaatccccatgtatctatccatcacttgacttcaacaattttcaactcatggccaattttctctccttatgacttcccacttcccccctatgcactgaataattctgaagcaacatcccagacatcgtattatttcatgcattactgtttctgtatgcttattttctctttaaagaaatcatggggcccaaataaagattgcagagaggaaagcaaatgtgcagaactggaaggctttagccatcattgcgggagtgatcaagtagcacctggtcttgcttgctggcatgtttgtgtttgtctcctgctgatgagaggagggtcttgctgaggctgagggcacgttgagccttggagaatcccatgctgcagtttcaggaagaaaggcaataagctctgcgatgacacagctgctttctagttaaacgcttgggctctccatgttcaggagctgagcagcactccaggcacaggcctcagatttcacttccctgggataaaaagctcacgagcccagagagtactgggagtgagaatggatttttgaaaatagaaagaactggtttggaatgcaggggaagtaactggtacaacagagctgagctgaggatgtcaaaatgcagttgtgaaaacagaagtcagaattctcagagaaattcttctgaaaaagagttaaagatctttaaaaggttgcatgacatttttaaaatctgatattcagaaggtcatcgtgtgaaacatttttacttaaagttgtagtagattcaacataatgttcgtgggaaagagagaagggtcttccccaggagatgaatatgactttaagagagggatttggaggtaggtggcctaaacctggaggaaaatgaagacacatgaggatttctaaaatgcaagagtcagaggacccagagagaggtgagatcttgtgataggttcttactggcatggcaggaaagcagaaaggccagcttgtatccacagatcaagagaaagcaggctggagggataaattattaaaaaccacagaaaagacaagggagactcagaaaacctgaaaacagtgtttctaagaaatcacaatgctgtattgttggaaaacgcagttgtattcagtgggaggaaaagtcttttgagtacgtaattaaagaggactatctgttagataaataaaaccactcagaaaggaaagtataatttaaaaaacactttgaaaagtataaactgctctactggcgtgagccatgttctaagaccttctgctaaatggaatattggttttcttaattgtggtgggcaatgctgccaaggacctcttggctcttggtgcttttcctgagataactgaccctaaaaataatgcctctctcccagtctggcctgagagctcttcatcgtactgtctgggctaggaatatttccagacgggatatccattatgctctgattatggtggtatttgggggcaaggaaggaacaaaaatgtaatgaagtctagtgttattttttaaacctcaaaagtttctgttttcacttcaactgaaagtaaagtctatgtggcctgtatcattgccctcagtcttgcaggcagccgtgcttcctacgccacacccagaatgaccttccccagagggacagagtctggtgatggaggtggggacacactgcagcatcagggaaattcaaccagcctggggcggtggggaggggctccattatccttttaggttttctggacactcaaccagagccttctctctcatttttgctcttcccttgacacacacacacacatacacatacacacacacacacacacacacctctctcacgcacacacacacacacccccactctctttctctctctctcacacacacacacgtgtatatgcacacccccacccacacacacatagacacatcccattgtgcaagcaattgacattagaattcacctatcacaccagtgagaaggaagcgggaaggagtctgatcaattgcaccagaaactcagcagcagaactgaacaaggacgagagttccctacagcccagattttgaaaaagtggcaacatcaccagtacagcattagtatccagaataagggggaaggataagagctggatgaagaaagacagtggtttttctttttccattttaaggagtcttaagtgtctctggtctatcacaagtgtctgttataggagtctgaaaaatacatgtaaatgaacaaagcaaacactgatacctttaatgatgtttctttactgagtgcatcatttgtgagacatctttatcttcataatagaaggataattaacatcactaattatctaattaagttcattaagcatccaccaacagagcaccgtgaagttgacattatgttctactgtcaacaaatgcttttgatttcttaggaagtaattaaaatgtaaattagcatacaattatatgcacaggggaagttttgaatcagatattcatttcaaaattgcttagagcaacacagtttttgtttgtttcttcttcaataaaagcagttattttgctgctagtggtatatattaaagtttccattgggctgttcagctcttgagtggtagcaaggtaataagtactataagacacagactgttccattgatatatttgttactgcactttgtgcttttttcttatttgatcattttgtgcttttttcttatttgatcattttatttaatgtttgtttgtatttgtgtccttcatgtttaaacatatcacaactgattttttttttttcggaaaagtttctgtaattcctgccttaaattctctagctgagctttccctttaaaggtattttagggcaaatcttctaatgtatgttttctgtcaggttaggttcagggagtatcatccatgacttgctgaaaataggttacacacattcccttacccatgcaggaaagagaaactgcacatatcaaacttgaagtccagccatccttagttgtaagctcacattttcctgctttcttagggcagagagcagacacggagcttgtgcaagccctgtgaatcaatggaatattctccatctgagatcatgatggcttctgataaaatattataactggaatgggcacactgtagtgctaaacgcagtaaccttcttagattaggggtcttcctgaaacatcacagagtcactgcacacctgctgggaacaggctacccaagatagaagccagcatgttcaagtctccatagctttcatttttaaaacaattctgattgaatcctgaatgcctatcttttaataaagcagctagttcagtggatgtgatgtccactctgttatctttgtacatgaagatgccggaccacttgagcatcaagctgatgtcacctgatgcagatgagaagagaaagtctctactcatgacatcaaactccctcaacttcttcttggatgatttttccaggaataattggtactggatccaggcccctcagttttgtgtggagaagatttgagataaatgcaaagcaaatacagaggtttaagagagactgtcctttgtccccttaaaaggatcagtgtcagggcctgactctgaatagaactggcagaaccactaacagcccatcaatgtgggtgcgggaagctatcctgagggcccaagcagagaaagacaggcatcatcattgcacagcagctggtggtagatgtgaaaccagctggtctgcgacaagcagtgtcctcactgcagggaatggtcgcctgtgccagagacagcagtcgccaggtgtgtcctgacttctgagctctgcagcaggacctgagctgtggtgcggtccgcggctgcccagaggaggacgccttgttctcatttgactgtccagaggggctttctcctgcaagttcactcgaaggacaatggctgggctagcagagaccccgaactaacaaagggaccctgatgcttaaaccggatgatgctgatcttctcctaatgtgcagcaagctcctacctcagctagttgataaaaatttcctgtaccagaaatgttggttcttgttcttaaaccttatcttaaaatgtagtctgccatgttgtgacttaagtgcaaagtccacacacttaatgaattatcagtagctacagtgacttgctttgtccatggcttgcttgcctatctcctgccagtcacactcttcctggtctacaactgtcgctgaaggaggagtctgtctctctaccatgggttctgcaatctgagagtgacccaaatgccatctctttgactgttcttttggccatgcagcctcccaaaaaatggggttaaagttgrtttgcttttggcaacaagactatggtctgaaaacccttccaacaaggaaggcactgaggttatgcaagctccacgaatcaatggaatgttctcatccaggtaacaaccactgcccgtttaaaggtgcattgtatctaaatgataccgaaaagtccttagggacagatactcagttccttccccaacaacttcaacctgaacggaaacatctagtttggaaagattaaccagatctcacctccatctgctaggtatttgctgatattcttgtttctttctcctctataatgacttactttattacaaagccaggctgtgtttatatgccatatatgaaggctgtgattgaggaaaaaattgagtaatacagagtccacatctgcaggtcaacttgcaatattttaatttacttaaatactttaccatttgcaattcaacaatacatggagtattgagtaggcatagcactcctttctatgaacacagagatgacacatggtccttatatttaaggagtccttatagtctgcttgtttatctcccaagttagatgacatccaaaaataaataaataaataacagtagatggatttcagaaaaaaaatgtatactgtatgtatcaagatcttgtaaagtaaaacagatttgaaattaatttaggaatctagcaacttaaaggaatactgggttgaatccttttgaaaatcgaatgtagttctttaaaggatacttacatgcaagcatctattttgaggttcagatttagatatattggacttcccaatgtaagatgtacctgmattctgaaaattagagtagtggttggggggaaaggtatcaccatcccaggagatgtttttaatttttaaaaattatgagttatgaggaaacacatttttgtgtattcatctaaattaagtgttttcaaaaacatattcatcaaggcaaaaatgctctagcattcaaaagacagaagtgtcccaaactaaaagataaaacggcagatggccgtggaggggagaatcagtctgggccctcctgaggcactgctgccattcacaacccgctaggccccccactcacagccgggccgcctggcgcctgccgcctgctgcatgagttacagccgccttctcgccctgggacccatctattatgagaaaccattttggttaattaaaaaagtctttcaaagtctcagaacaggaagttctgaaattttcttctcttcgttgttgttgatgggggttgatgtaaacttggctcttgggcctggcaaagaaggaaggagagatggaatgtggaggagagaggggagacagcagaagaaagcactgagtccaggccgggtgcagtggctcacacttgtaatcccagcactttgggagaccaaggcgagtggatcacctgaggtcaggagtttgagaccggcctggccaatatgatgaaaccccgtctctactaataatacaaaaagtagctgggtgtgatggcacacccctgtaatcccagctactcgggaggctgaggcaggagaattgcttgaaccctggaggcagaggttgcagtgagccgagattgagccattgccctccagcctaggtgacaacagcaaaactccttctcgaamaaaaaagaaaagcaccgagtccagccctggcccaagagtgaggcttggggctcccaggtgcttgtgtatccactatcacagggagtgacagtggcaatggttaagatcttcgaatcaaatgaaagagcaattgaacaagcctgagtcttttccactctggatttaagggattcctcaagcctaaggcctgctgtgcagctcagatgacagtgagtaaaacagataaggctcccacactctgtttgaggggaagcagatggcaagcacatgggaatgcatgagataattctaggtacataaagaaatctgaaagacctagatgatgcgccagagacttaccttgtgatggctgtaggttggaaggtccaagaaagcttctccaaggaggtgataatgagagatgaaggagcggccctccaacatctgggggaggagagcttgggaaaggacccagcaaatgscaaagctccggggtacaaatgggcttgtatatttgagagcagagagaggcccatgtggctgggcacagacaccccttgggggagtgggagtggctcagaggaggtggcaggagccggccaccaagcatcattccaagttcttcagggaattgggaaagttgtctataactctatatctgtggcctctatatctgtattttcatctggctctagctctccttctcctctaccaaacccctgtccccacactgagagggcttccttcaacctcccccacacactcatgatttcctgccatgttccaggcccttgggttaaggccagggaatactgatgaaaaagggcacagtccctgccccaggaggtcctcctgcttctaggctggtgaaataattatgctgtaaaaagaggtgcccagaagagagagtgcaagtctggtttggaggagcttgatctgagacttggaggaggaggtggaggaggaaagatgtgagggcaggttgatggtgaggaagagccccctccagatgcaaaggatggaccctcgtgatcatctgccttgtgggccaggtgctgtcttggcattactggagtatcctatccagttcatcttaattttatgtatttatttatattctgactctctccccagaggctttatggtacctctagatgaggatgtgtgcaataaaataaggaaatgagatcaggaaagaaaatratcatagaagaaagtcaattcctaggaaattcagagcttgaatatacagtctctaaagactcaccgtcacataccagcactgtgctccagcttcctgaatgccactgtggagtggtaggcaagagggtacatgcatccattcctcatccatcaactgtgcttctgccaagagccaggtccagggctggagaatagggacacggggtgagcaaagcagatggcctctgcctcacagctgactctgccccatcctgccatcatgtcacccccactgtgagtttctaaagatctgagctgacaatgtcatgcctctgatcaaaaaccatcattagtttccaagctgtgcagactcagacttgtaccaatggagttaagaagccttgtgtagctgaccccagctgcttatccaagttcatttcctgtcacattcccacatggcatctttgctccaggcaggcccacttccatattttgtagtagtgcaggctattttctcccgtctctacccttgggaaaatgtggtcctctctgcttagaggaggcctgcagggatactgtcccttctgaaagcccaccaagccytctccagcctggctgtgagccggtgtggcctcctctgtgggcaagtcattttctcatttactccctcacaagaactttaagttcctggtgggcaagccttgttccgtgcccatcttgaaggccttcgggtttgcacagggcctgaactagagcaggtgctgtgaatcamtggctgaaaagagactgctaggaagaagccaggttcatctatttcaggcttacctattttttatgcacaatggctgcatctatggggacccagcctaaaggagggagaaatgttggtattgaccagtttacctatgaccctcaggcagcccagtggtgagtcacacagtaggactaacatattggctagtcacagcgtggcttccaagaacatcaggaagagtggctgtgcagcatcctagagctggcatgtggttgggtggcatcaggaagctcctggagtgggtgcagcttgcagccagtgctgccaacggctctactctgaagtcgcagcaatggggcagtcctgaccagggtgacctttttgctcttcataaagcccgaagaagagatctccccatagactccagccctggttgtgatctgtctttgaaatctgtcagttttggggtccaggtgcctcagtgctaggggagaattatttggagtgaaagttcctatattagtttcctgggacagccatagcaaagtaccccagccagggtggcataaactacagacatttattgtctcgcagtcccggaggctagaggtccgagaagaaagtgatggaggggctggtttcccctgaggcctcttttcyggctcagagatgctgccttccccatgtcctcacgtggtctgtcctctgtacatgaccgtgtcctcatctcctgttataagcacaccagtcacgtaggattagggcccatcctaatggcttcactttaactttatcacctctttaaaggccctgtctccaaataytgtcacattctgaggtactaggggttagggcttcaacatatgaattggggggaacatggtttagtccatatcagtgcctcacgtctcaatacatattcagggaaagatgtttgcatgggctgaaactcctctgaccccagggtagatcttcacattcatctcttatccaaaccccctccagtaatccctaaccttcttgccctgcctgagggggtgtgagtctttaagaacattacctgtgagaatgaggccgacagagatggggtgagaataggcgagttcagggaaggccagcgtggcgacacctcccacctgtctaaggctcacagaggccctgacacccacaaaggaaagcagagaggagagaagatggcttccttgagaaggcatggtgcctgcaattttaaaggatttgtcttttgctataccagtgtggatttttttttaagtagtcattcttcatgtactcatgacaattgaatttaataaaaacatcacagttcgaaaaagacaaattagaaaccaccgttcatctcagaaattaatatgtgagtgaatttaacaagagatgaattgcactgtggtggtctggtccctcttcacccgctcggagcgccagttgtttgtcattatagctggaaatatgattattactctggtattacttgacatttgttaaggatccaggggctgcatctccatagcagagaaaagtgcaattacctgggcactcagagaaaagagccttttctggcctgagtcatccaaatacacgtcccccaaagacccctgagccccgaccatagcttgctgtggagcccaggctgtccsgtcactcagtacacactgtgccttcttcctcaagggcagccagcattttctgggctcacataaggatagtatacacatgatttaccaacaaacagggacagcatttcatctcctggtgttctcattaattgcttctatcactcaactaaaaccaggcctccactaagaacttgtattccaaggtggatatgtcagccttctgaggaggacacataatagaagtgtttaggtcacccrtttactggatcctttgcaactagtaaaagactgcattgcagatggacttaaacaaggggtgggagtaagagcaggagctgcccaccctgaccctgctcctcgtaggtggcgtcagcaggtcatgctgggtctctttaatcctgacccctggggtattttactctgggcaggggrtgaccagctgtggcgatttgggccccagtgagtgaggaaggtctgtgaggttcttttcagtccctcaaagtttgatcactgcctccacttgggaagccctgaatcatgaccttgaggagctgattttggmgggctggtggggaagcccctcacggcgacacagaatgctgcccctgcagagcttacctactgctgtggcaccccgaggaggcgagctgggaaagagaatgttcatgacaacaattagtttacacgataaccacagagtgctcgcacaggtgtggctcctctgttcctcactgctacgactgtggtcaccaaatccctcatcctcttagccagctctggtgcaggacaggtggcaagtgggttaccattgcgtccagtgagaatgaccaatgagaacttgggatctctgggggtggtatctaccttggcagcagtttcactctgccctccatgcatgggggatcccctgagtttaactggaatctgtctttggtcagggagaatcagatgctaaaggaatctggagttgacattaaaatcaagcagcatgaccattgctttcctttatggattttttggttaatgaatacacagaamccttaaaaaaataataaagaagacagcctatggagtcacataatatatggggttaagttctaaagtctatttataaaatggaaatcaagttgtcagcaatactcaacattccctcaaactatccatagaatacatgaccatctccagtttggtgaattctgcaccatcctgcacatccaccaggcagcttttccaccattttgtacatcaatcagtctttctttgttaagtaccagatgaagtgactggcttgtgcaatttcagcagacaagacttacccccaaaattattgtttttaaacaggagaattacatttaatacaacgagctgttgacagccaagagagcctgtggaatggcgtctccctcagggagcagagactcccattctccatcccaggttcacagtgggggttaggatggagggttgggtgaattcccattgtgatttagaaaatcatttttaattttgggatactttccacattcacattcactacttccatgtcctccccacccagttttccctattgttaacatcttattaccatgaaacatttgtcaaagctaagaaattgacattgttgcattactattgactaaacatcagactttattttaatttcatcatatttatctgctaacccagaattcaatccagggtaccacattacatatagttatcttatctccttagtcttctctggtttgtgacaatttctcagatattccttgttttttgtgactttgacagctttgagtatggtcagatattttgtaaaatacccctcaatttggtttgcctcatgcttttttcatgattatccttgggttatgggtctttggaaggacaaccacagaagtgatatgcccttctttccacatgatatcaggggatacacgatgtccatataatgtcatcactgctgatgttaacccttatcatggagttaaggtggtgtctgtcagattcctctatggtaaagttactgtttctgcctttccacacttgatactttggaatcaagtcactaagtccataccaccctcaaggggtgtgagcaattaagctccaatgtctggaaggggattatctacatatataatttaaaattcttctctaaggaagttttgtctcttcttctgtatttatttcttcaatcttatttatgtcggtagagattcattcatatttattttgtaatttgggctatcatccattaagcccattaagttacttatctttttgttcaaatggttccagcttttttctcatagtatttaactgatctcatatgcgctttccctgtaactctcttgatctccttttttctgctcacaattttgttttaatacaattccactataaccctttctaacatttttggtgtgtgtattactcagaaagtattaggttatgttacagtaacaaaaactctcaagtctaactggcctaaaattgcaaatgcttatttctcacttgtgctatgagtaccctgagtgttggcccgagactctctataccttattctcactcagcgacactggctcatggtgcagccactatctagaacattgagtgttgccacacagagctgaaaaagagagattagcagactgctgtcaagcttctgcacatctctccctggcctcaccaagatcaaaagtagcaggaagcttcatcatgccactacctataggaataaaggcctggaaatatttgacaaacaatactaatggccagcacattgtatattctgttagtttttctttcctaggcaaatatacacagatttaattcttrttcttgtaagcatactgttttctattctccttttaaaatcttgatatagcaagaacctggtgcccatcaataggtcctttttgataccagggctgctgtgaatgattaggtaggttgtatggaagggcatctggccagaatagaaaaaggagactgaaatccagactttgccccactattcaagtcatccatctagggtcaggatggtgtccacccaaagaggatgccgaggtgctgcaagactgggggcasccgttggtgagagcttgatttgtgctgactgcatagcattctatcacaggatggaccctcctccatatgtggatgcttaaattgtttcattttgtgctgctatcaacagggatggtgaaaaatgtccactatttgtgcaaatatcttatgatttccttgggataaattaatggcagtaagaaaggtgagtctaaggatgaaatggtaatcacatgtccgttcatggccaatacagtgcaggtgaggactcggcgtccctcccctctgagtttagtcccaggcctgacatgtagtgcgtggctgaagtggccaggacccgtaactgtcatcgtggcatcaagttgctgagcaggatctgatctgctgccttcagatatcagcctttctcatttttgtgaggccacacaactgtgattacaggactaatgatgctttaaacaaacaagtgtaatgactgtcatcagtggttagcgggtgtttcctgygggacagcttggtcagtagtgtcaccagcagctggccagccctagggtgccccaggcaaaggtgggtaccaccaagctttggtgagcccacttagaagtgaccctccatggagatgtgcccaatttcccattccaagttctgacttgtctcctgcagccaaggccctgaggaggcactgggagagcagggcctagacccgctttgcctcccaaatctccaaacagctcttagaggccctttgttctactccaaaggttctcaaactctttaatgtgctggcagttgctaagcaaatgctatttagttccaataagcaatgcagcactcagctctgaatctgtccctgcttgatgtgctacattcactgctgtctaggcagatgggcctctgcccttgacctgacccaaatctccttcctcctgtctccacatccctgagtatgacaactttccagggcacaaagggctcaaaggccagtgggaaggtggagatacaccgggtggaaatacatgagagaaagacgcccatagtgacagagtccaaagactgatcttcctactctgccacttcctgtattgacagtcacttatcctcacttggcctcgatatcttctcctgtaaaatgatagtaatcatataaatttgtcaggaggataaattttaaatgtgcacatgcataacttctttgtcagtcataaagtgccctgtgcctgttagttaattgaaagtaatrttgagagaacagaccaagggatgatacatatttgggttatcaatactcttagataatccactgatgtgctctgggtctgttccctgttccattctcccaagcattcaccactctgttcaagatgctgctcagctctcaggagaagcagtcattttgcctcctactccactctagaaacggaagccatgaggtgtgaaccatctcactctccgtgcaccagctacagcctcatccccatctgcagccatcttcaagccctccctacaagctcctggcctgaacagcctctcccgtcctcatcactcaactcagccgcttcatgggctgtgtgtcccatccttattttcttcccctgtagaacctgaaccctcagttcctttctgwttcgtttgctttttgaccttctcttgtccactgccaagctcccctcagcctctaatatactgtatgctctgtcttcatgtccttatctccaaatctctaattgacccattgttgtttaatcactcgtctgaaatgattcttgcagaaattaccgaagaccaatttctacagccaaacccagtgaatattttcagacctcatctcaccgggcttctctgatgcatttaccatgtttaaaccacccttggttttcatgattttccccaagctgctctaacccttctcctcctggcctaaattttgctggtattctccagttttctgaccttgtctgtccttactctccttgagggatcttattatctctcaggagtctctgtcgcctggttgctaatgactcacaagtccacatggctgtggacccctctcctgagctttcttctagagatatcccgctgtgccactgacacttcaaattcaaaatgtcttcatgtcacacaaacttgctcttatttttgtgatctcttaacttttcttagtttgtctaatttaatccattcaattaagcaaaccagaaatttggcagtaattcttgccctctaatgcaatcaacaattcctaccaacttactctccagatggttcttgagtgggattcttccacaatactgagtccaccatgtgaactctcacctgggctgtcataacactgtcctaagagagtgccttgcttccaggcttgcattcattaaatcaattctccaaattacagttggtataaggtatcaaaaatattaaatcaaaaaatgctaaaattagaaaatggaaccacatcaggcttctgttggaaagctctcattaaagattcagctaaagcaacatctcaaccttctgaacactgggtcataccagtcccctcttctgtaagcctctctcactgtacctgtgtcactgtgtcatctctgccccagcattgactgtgttagctcatagctatctgtctgttcgttaggctctacaaagccaggtgtggggtttatcttcgtaatctagtgcctggaaaatagtaagtgatcaatgaatgtttgcagaacttaacaacagggagtaactttgaaccctggaatggagattctgagccagagtataaccaattctggactgcagctattgtagaaaaggtatttctttgaagtatgaagatgtttataaccaaactcatagagcattttctttaagtgctaattktaatttttaggagacagtctaagtcatttttttttttttttgacaaggtctggctctattgcccaggctggagtacagtggtgcgatctcagctcactgcaactctacctccggggttcaagccaccctcctacctaagtctcctgagtagctgggactacaggtgtacaccaccatgcccagctaatttttgtattttttgtagagatggggttttgccttgttgcccaggctggtctcaaactcgtgagctccagcgatccgcccacctcggcctcccaaagtgctgggattacaggcatgagccactgcacccagccctaagtctttttttttcaactgatcttattaatgacttcaatattttacaccccaacagtctcactaggcgatcccttgcagtttacaaaatattttcattctactgtctcatcctagcttcataacatctcagcacaatagacaagagaggtcctagtaacctcattttatagatgataagtaaagtttcagaaagattgagtgatctctcctgtaatgtgactactaagaaccaaaaactaaggtgtckggatttctgcgctttctgcttcccacactgttattctgtagtgctcagaacatgaaggtcttttcctattatcacactgaagttgggctgactgaacctccctactttgggcccacttaacccatgggtgtcatcatgacaaggcctatccctctgctgcaagataccccatttatctgaaggcagctgctttgcatccaaggtcccctaagagttctgtatttgtgctgcatatctccaaagtaccataatagaaaaaagtctgggcttttgccttagatgtagaattagtcaaatttttcagcattttatgtcacttgtaatgctcataatgattgttttacttttaaatatgtataaacaatgtaacagcaatattgaaaaaaattgcaaacaaaaaaaatgaaagaaaagaaaaagaatgaaatcaccctattccctttattccaaaacagtaactgggtttttaaaatgatattgtttttatattttttagtgtttgccaataaacactttttaattttattggaggataatatacatagggaaaaagtggatcataaatatacagatttaagaattttaataaagtgaacatgtaatcaccattaatgataccccagtagcatccctgactccatgcctccttccagtctctatcaccttcttcccccaaagtagtccctcttttagtatctaatatcataaattagttttccatatattaaattttatataaatgaaataacatagtatatactctttggtctggcttatttcactgcaaattatgtttgtaagatttatctgtagtagtggttcatttgttttcacagtggtagggcaacagttctcaaactttttggtctcaagacctgttcactttcttaaaaatcattaaggactccaaagagctttggcttatgtatattttatctattcatagttactatattataaattaaaacaatttttaaaatgatgcatgtgctaatttattttaaaataataatagaaataatagacccattatgtataaacataacattttgaatgagtacagtagtcccctcttactcacagttttgctttctgcagtttgagttatccatggttaaccatggtccaaaaatattaagtagaaaaatctcagaaataacttataagttttataacttttgttacagtatattactataattactccattcattattaattattgttgttaatctctttctgtgcctaatttatagattaaactttatcataggtatgtatgtatagaaaaacagtatatatagggttcagtactatctgtggtttcaggcattcttggaatatcttggaacgtgtcccctgaaggtaaggagagactattgtaactatatttttaaaacaaaaaatgtaagaaaagtggtattgttttatgtttttgaaaatatttttaatatcggtaggacttagtggaaaattgctgagttcttatatctgtttctttgttcaatctgttgtagtatgttttgaaatagatgaagaatatctgacttcccacagatatgcagttagaaaaggaagtagtattttaaaagtcttttttgcgagatagccactatattttaatacaacagaatatgaaaagttgattgatattgtttcagattccacatctcaacttacctaaccagatactacctgtcagattgataagagtattcaagaaaaatatccagttatctgaagagactattaaaatactcctctctttttcaactacatgtctatgtgaggctcagttttcttctgattctttttttcttcttcttttaattatactttaagttctggagttctggtgtacatgtgcagtaagtgcaggtttgttacataggtatacacgtgccatggtggtttaaggaaattatattcttctttgatactataccaaaactcaacaagtagtaacttcttaaaggacacttgaactctatcagtaacatttttgtactctgttacgttaaaatgtgttgatctatcttgcactttgagtgactattttaagccatacattattttgtaacatgcattagaacatacagatagcatatatgggaaatattggttccctgagttatggagttctcccaattgttgacacattttattatgcaatatagaaaaattatgctgaagttaacaccactcttaccagaaaaactcttagctactgggacactgtcaagctcacagaggcacacagatacaaattttccaaaattctagtatttgcttgatttttctaaaatttgctcaaattttatctttggcagcaaatactgtcagttgtttcatttgagatgacaggtttactttgctcactttcaagaaaatagctgccaaatactcatgccaataactgtaattttgtctgccagtcatttgttcagataaaaatgatgttctctgagagaagcagctagtttggctcacagaactaacagttatgcacatgcttttccttgagacaaccatcacattttttttttggtattcagaaatgctttatgcagacttcccattttatcacacaaactattaaaaaaagtgtattcagggttgagatttaataaaattaataatttgtactgcttcatcaaagatattcttaagtgaaaatagcttttttttttcctcctataagctcttggtggtggggaatacacatgatgatttttatacagttggtgccaatgtcttgatttgtgccaaggcattagttttgtttactattgctttttggggccttcaatgcaatttcaacacgggaaaaaaaaggcaaaaatgtcatagtattttgaaggtagttttaatttcacatggcctctgraaaggtctcaggaatccctagaaatttattgaccacattttgagaatcattagtatgttcaatatataaatataagttatttagccagtctattattaaaaggcattaatattaaagtctctatatccatctagatgggtgacctgggtggaacaaagtgtactaaggtctttatatcttctttagtaaaatgtttattcacatcttttgtacattttctgatgatattttttgttttttacttgttgatttttttttctttttttgatggagttttgctcttgttgcccaggctggagtgcaacggtgcagtctcggctcactgcaacctccactgccaggtacaagcgattctcctgcctcagcctcccgagtagctgggattactggcacctgccaccatgcctggctaattgttttgtattttcagtagagacaaggtttcaccacattggccaggttcgtcttgaactcttgacctcaggtgatccacctgcctcagcctcccaaagtgctgagattacagatgtgagccaccacgcccagcctacttgttgaattttaagagttcttcatatattttagatgttaatcctttgatggatatgtgtcttacaaatattttctctcagagtgtagattgtcatagcgttgttctcatggttttgcagagcaaaattttaatgttgatgtccagttcattaatttttctttttacaaatggcagtcttaatataaaatctaagaactctttgcttatccctagatatgaaagattttttcctaaaatatgtatagttttatgttttacattaaagtctgtggtccattttgaattaaattttgtataaggtacgagacttaggttcattttttgggcaatggacatccaattgctccaacaccatttgctgaaaagctatctgttgaatagcttttgcaactttgtcaaaaattagttgggcattcatgtgtggattatttctggattctctcttctgttccactgatctatatgtctattcctctctcagtaccgcacattctcaattactgtaactatgagtatamtaagtcttgaaatccggtggaatgattcctctcattttactcttagttttcaaagttgttttaactctcctagtcccttttccaattgacaccagttttrgaaactcgtctgtatctagaaaaagccttgctggtattttaataagaattttattaaacatgcttagcaatttgagaagaaatgacatatttgtaggttgagtcttccaattcatgaacatgatatgtttttccttttattcagatcatcttttatttctttcatctgcatttcatagttttcaacatatgcatcctatatgtgttttattagatttacacttaagtttttcattattttcaagaaattgacaatgatattgtttttatttcagcatccatgtgttcattgctaatattttgaaatacagttattatgtgtgtgttgatcttatatcctgtgaccrcattttttttgtaaataccttgagtatttaccttattgaattttgttttgttttgctttgttgtaaataccttaggaattcaacagaatcagggtatctacaaataggracaattttatttatttcttttcaatctgtatggcttttactttttttcttgccttattgcactgaatagaacttctagcactatatttaataaaagcagtgaaagtagacctctttactttattccaattttaaagcgaaagtattcattatttatcactaaataagatgttagctgtagagttttcgtagatgccctttatcaagttaaaaacatttatacctattcctagtttgctgagagttttatcataaataggtgttaaattttattgaatgttatcctgtatcacttgatatgaccatgcgattttcttctttaacctgctaaaatggtgagttagattgattgattactttttggatatttgtcagatttgcattcctggaataaatcccacttggccattgtatattagtgttttggggtgttcttgaattctgtttgttaatataagaaattttgcagctattcgtgaacaaatagttttctcttttttcgtactgtttgtctagttttgttatcaggctattgttagcctcataaaactaattggaaaatatcatctcctactctattttctagattatattttgtaaatttgattttaattctttttaaatttttaataaaaccttcaagtaaaaatatgtggatatggcaatttatttttggagactttaaaaattaggaattcagtttttacagcagctataaggctatgccaatgatctatcgtattggatgagtcgtggtagtttgtgtttggcaaagaatttatccatttcatctaaattgtcacattgatgtgtgtacagttcctggtattaccttactttttatgcctgccaggtcagtagaaatagcccctgtttcatttttgagaattgcagtttgtgtcatttcctttttcatctatgttagtgtttctaaaggtttgtaaattctatctcttcaaagtacaggtttttgtttcaatcatttttctgcttttctgtttttaatttcattgatttctgctctttattatgaccttccttctgcttatttttcacttttttctagttccttgagtaggaatttagattatttatttgagaatttgtcttatcagctcaggctgctattacaagttactacccacaggctggcttatttctgacagttctacaggctgggaagtccgagagctaggtgccggctaattgtctccctggtgaaggctcccctcctggcttactgaaggctgccttcttgctgtatcctcacatggtggagagagaaagctctggtgtcttttccttttcttatgaggacactaataccataatgggggtctaccccatggcagcatcaaacctaatcacttcccaaatgtcccacctcttaataccattatgttgggagttaggattttaacatatgaatttgggggaacacaaacattcagtttataatataattttactcttttgtaattatgcatttttgccacgtattgtcctctcaatagtgatttagctacataaaacaaattttgatattttctattttcaatttcattaaatttaatgtattttttwaaaaatttattttgagacttcttttttgacacagattaaagtctattgttagttcctaagagtttgaggatttcttgttatccttttgttactaatttctagtttgattcaattatgtatcgaggacacattctgcatgtttttgtttattttaattttttggatttttttttatagcccaagatgttttgtgtatgttttgagagcaattgaaaagaatgtgtgttgtcttgttgggtgaagttggctaccaatgtgggttacttgaacatttttttggaattaaattttcatttatttattgtgttttgagtgtatctctctgtgtaggttttttagttgttgctctaggtattactctccatttataatgtaatagttttaaatattttctctacactcgtttaaaatcacacagtgttataaaatcagacagtgttataatttttgttttaaccatcactaataatttagaagtctcaagaggaaaaggatgtatactgtatctacccatatttatgttgcttactatattccttttttcttcctggtatttcaagattccttcttttatcatttaccttctgtttaaagarcttcctttaactattcttatagggtagctttggtggtgacaaattctcttaattttactttatcttagaatgtgttaatttaccctttaatccaaagggatatttttgctggatataggatactgtgttgacagttctttattttcagcacttgagaaatactgtgccacttccttttggactccatggcttctgatgaaaaaaatcactgttaattaaatactttcccctctaggtaaggtgttgtttctctcttcctgtgtttaggatttttttctttgtgttagttttcagaagtctgactataatgtgtcttgacatggatttctatgggtctgtcttgtttggaatttgcttagcttctgaagcctgtaggtttatatcttttgctatttgggggattttttcagccatttttttttagtaagttttaggcaccagccactttatccattctttttgggattctgatgacacaaagattaaatcttttgttatagtcctataggtagctaagactttgttcattttttccattctactttctcactgttgttcagaatagctacttgctattgttctattgtccagttcactgactcttccctttgtcccttgcattctgctgttttacactgggttcttctttatatcttctatttatctgataaggtgttctatttattaacagaggctccctaattttttaaaatttgtttcagaatgttttaaatttgtagttgttgaagcatttttatgatggctgctttaaaatctttgtcaaatagttctaacacttctgttatctcactgtatgcatctgttgattgtcttccttaactcagtttgagattttcctgattcttgatgtgagtctatgttatgagactctggattttatttttccctaaatattttttattaaacagrtttatttatatgtaattcatataacatacaattcacctatttaaagtaaacaattaaatggtttatagcagggatccccaacccccaggccatggacccggtatctgagccctgcctcctgtcagatcagttgtggcattagactctcataggagcacaaagcctattgtgaactgcacatgccagggatctaggttgtgttctccttatgagaatctaatgcctgatgatctgttactgtctcccatcaccctcagatgggaccatatagttgcaaagaaacagctcaaggttgttctatattattgtgagttgtataattatttcattatatattacaatgtaataataatagaaataaagtgcataataaatgtaatgtacttgaatcatcctgaaaccatcttcctccaacccctcacctctggttcatggaaaaattgtcttccacaaaaccagtccctgctgccaaaaaagttgagaactgctggtttatagtatattcccagatatgtgccaccatcactgtaatcaattttataacattttataacctcagaaagatactgcatattctagctatcactcttctatcccccatccctctagtcctaagcaatcactaatatactttctctataaacatttcatataaatggaatcatataatatttgggcttttgaaattagcttctttcacttaggatgttgcttttaaggctcatgcatgttataacatgtgtcaatacatcattcttttttatgactaaataatatgccatcatatagacagaccatattttgtttatttgttcatcagttggtggacatttaggttgtttccaacttttgactattatgaataatattgctataaacattcatgtataagtttcagttggacacaatttttatcttgggtgtatacctgagaatggaattgctgagtcaatgacaacactttatttaatcatttgaataactttcagaatgttttccaaaattctacaccattttacattcccaccaacagtgtatgagagtttctatttatccatactctcaataaaacttgttattatctaaagttttgattctaaccatcctacttggttggctgtatcattgatctcattgtgagttttagtttgcatttctctgatgacaaatgacactaagcaccttttcacctgcttattagccatttgaatatcttccttgaagagcagtctttttggatccagtgtccatttttaaattggattatttttctttttattattgatctctaagtatttttgtatattctagatatgagtcccttatcagacatgtaatttataatttttttttcattctgtgggtctttttttactttctaatagtgtctttcgaagcacaaatttttacttttggtgaagtccaacttaccctttttgtattagtccgttttcatattgctataaagaactgcccaagactgggtaatttataaagaaaagaggtttaattgactcacagtttggcatggctggggaggcctcaggaaacttacaatcatggcagaaggtggagaggaaccaaggcaccttcttcacaaggtggtgggaaggagaagtgttgagcgaagtggggaagagctccttataaaccatcagatctcgttagaactcactcactatcacaagaacagcatgggggaaaccacaccatgatttagttgcctccacctggtctcccccttgacacgtggaaatgatggggatttgggggattrcaattcaagatgagatttgagtgggcacacaaagcctaaccatatcacttttcactgttgcttttatttttggtgccaaaatctaaatcggacaaatgccaaatctgagatcatgcagatgtacttttaagttttcttctaagagttttatagttttagctcttctattcaggtttttgtttcattttaagttaatttttgtatgttatgcagtaaaggtttaacttcattattttgcatatggctatttagttttccatcgccatttgttaaaaagactattcgttccccattgtatagttttggcacctttgtaaagaattaattgaatatagacaaattgttttatttttggactctcaattttattccattgatgtatatatctattcttatgccagtgctgcactgccttgtttgccattgctttacagtaagttttgaaatcaggagctgtaagtctttctacattctttattttgttaaagattgttttggttttggaggtcccttgtaatttcatatgatcttgaagattgacttttcaatttttgcaaaaaagagtgatcattggaatttgatagggattgttaattctstagattatgttaggtagtattgacattttaacaatataagaacttgttaccatacatatgggatatcttctattaatttaggtcttccagtgatattttataggtttcagtgtacaagtttttcatcttggttaaatatattcctaggcatttcattattttgataatgttataagaggaatcgctttcttaatttattttttggattgtttattagtggtggataggaacacagctgatttacgtgttttgatcttgtacactgaaactttgcttaattcatttattggtcctagcagttattttgtggaatatttgggattttctatatatagaatcctgccatctgtgaacagaggtgtttttcttctctttcaatttggatgccttttatttctttttcttgtctggttgtcctgtctagaaccttcagtacattgctgtctagaagtgttgaaagtggacatccttgtcttgttcctgatgttaaggaacattcagtccttcaccaccaagtataatgttgtataatgttggctgtggactttttgtagttaccctttatgagattgagaaaattctttttccccacccagttggttgactttttgttttgtcatgaaagggttttaaatttttgtcaatttttttaaatgtctattgaaattattacatggtttctgttatttattctattatgtggtgtagtacattaattattttcagttgttaagccaactctgcattactaggctaaatctcacttggtcatggtatataattttttayatgttggtggattcagtttgttgatattttgttggggatttctacattaatatttatatgagatattggtctgtagttctctagtaaagcctttgtctgttttctgtgtcagggtaataactggtcccatagaatgtgttgggaagtgtcccttgctcttctaattcttggaagagtttttgaaaaactgccgtgaattcttcactaagtggtggttaggattcagcagtgaagccatctgggcctgggctgggcttttctttgtgggtaggttttgttgttgttgttgttttactaattcaatttattttcttgttattgatctattccaattgtccatttcttcttgagtcagttttggcaatttgtgtctttctaggaatttgttcatctaatctaagctatttaatttattggcatacaattgtttatagtatttttttataatcttttgaaaaaattcagtaaggtcagtagtattgtctccttcatttctgatcctagtataataatttaagcctttcctcttttttcttggtcaacctagctaaagactgccaattttatcgatctttccaaagtaccagattttagtttcattaattttatttattrttttttatattctgtaattcattactttctgcattaatatttattttccccttccttctacttgctttagatttagtttgctcttttttccccagtgtmttcagatggaagtttcagatattgatttaaygtgtttcttttttttcttaatattggcatttataactatgagttttcctttatgctcttctttagttatagcctacgtgttttggtatgttgtgtctttatttttattcatctcaaaaagttcccttttgatttcttctttgacccattagttatttaggaatgtgcttttaaatctacacttatttttgagtttgccaaatttctttctgctaattgatttcaaattttgttccgttgtgattaaaagacatgctttgtattatgtctatccttttaaatttactgaagtttgttttgtggcctcagcttctcatccttttgagctatttgaaaatttgcatgtatctcaaggtccaaaaaatagaaaaaagcataaatgtcgggcacacctcagtgaattcctcttcagaatcttggctcctcaaattcagctctcttggtagctctctgctgtcttagagcagattgttcaaatctaggtcttttcagtcattcttaggaggaaggttgagctactgcaagctagttcatcatagttggagatggaagcaacccataaacacgtatgtgaatgtattcatatgtgagtgtgtcagcataggtgacgcctgtatttatatgaatctcatttgaccaacaaattctgtaaccactatttcctctgtcaattggtcagtatagagacgttcttatctaaaatcacaactatcactcacgcttgtaatcccagcactttgggaggctgaggcagatggatcacctgaggtcagaagttcaagaccagcctggccaatgtggtgaaacctgtctctactaaaaatacaaaaattagccaggcatggtggtgggcgcctgaaatcccagctacttgggaggctgaggcaggagaattgcttgaacctgtgaggcagaggttgcagtgagccaagattgtgccactgcactccatcctgggtgacagaatgagactgtgtctcaaaaaataaaataaaataaaataaaataaaataaaataaaataaaataaaataaaatcacaactatcattaagctgtgacttgttttctcctttctccaggattttgtgtcatgtatagagaactacagaagaagaggacaagagctatatgcatctttatacaaagaccatgtgcaagtaagaaacaaaacataggctttctctatacagcaagctggaatccaccttgaacctgaaaaataattggaagrgcctttggtttacgttctggattgctcaccaggcttgcaccatgttggggttttgcattttatcctaaatgcaatgggttgccactgacaagggcaggcttagatatttaaagtacctatctaggcctgactgctgtacaatctaggcaaagaacactggctctcatgccagtcagagctttatttgaattctaagtctgcccctttctatgccagtggtctgagcctctgtgtgctcatctctaagctggaataagtcttcctacctgtgaagatttaaaagcaagtgtgaagcacccagactgtggctgatagagaatggataacccatgtgtggttatagaatagctaagaagtttatttttatttggtgttactgttattaataaaaatttaacatattgctaaaaatagaacacaacatacagtcttaaaaccctgttgaatatattatttacccagcaatttctttgtcccaaagacagtgtgaagtataaaaaaatgcagagattatgatactcctgtgtcttgaaggtgtttgaaacttgtagatgaaacccagagtaaagaattgcccacaatacatggtgatgagctcaatgataggatgttctactatggggaaaggagcgatggggtataaggagccattagtgtgtcctgggtgggccacagagcaggaaggcttacacatggtgcccrgtgccaggaaacagaagaggcactaatcatctgaaactgagttgccttgtctagtttcccccttaaaagcccacaacatgcccctgggaagacccattcatggatgtgcakcctgaaccccagaaacacacagcttagcaacatagcctcccaggctctcctgagtgatgggagcagcagcttaccagacaggacacttgtgagaaacgaggtttggtgtgtacaggatgtgatcatggctgtgatagtcagagggatcagcaggcatgtctagtttttctgagtgcacaagctggtctttcacagaccctytggttggacaagggttttctctgtgggcatctaccccactccaacattgctgactgtgctgcacagctgggtagggtgtcttgctggcctatatgtgtgtcatctgtgcctattggacagaccattgcacgttaatgactcacaacatggattgacagatttcactcagggatagcaatatggctgataaatttaattgccactgagggggaaataagatgaatcttgtaggattgcatcctttattggtggacatcctcatcaccactacaccattttgagatggaggatgtggtttatctaaacttcctaatctgcatctcgtctagagtgcaaccatttctgctccaatggttagaagagcctgggagatacagttatggccaggagagatgccctggggtactttgtgaaattctgttgagatctgtgagattataggttcttgtgggaaggatgcaactccctcaagcccagaaggaagggatccagccacctgaaaggttagcctgtctcatcttcagcagcagggctgactggagttcagaaaggacttgagaaagttgtgcaattttcctgttgattgaggtatttttgagaaaatcagcatttggaagctaatccacaaggatactttccaagtatttaaatatttaagtcaggttgttttgatatttgaaagaatgaagatataataacatctgccatagataatgggatgtggaccwttgccctgcttttttaaggagtagtatgctttcccaagaaaggcccattccacttccagaaaagtcaggtccaaactctggacagagattaggcttaagaaatctgccacgtcctttgagacagcttctcccaggtgcaccaaatgaggccctcctaagaaggggagattcaggggcccttgcccacagggtggccagtaacacaccacgcaggacttttctaaccaggcactttacccacaactgagaggtgactggagatggcagcagcccccagcataagaaggcatcattgcctagtgccctggaagttaacccaagcatcattatatcccattattatatcaacagcaaacattgcaattcaaatagtcaatcagccaatttttttttttttgatccagaagttctgacaaaaagttgcctctacagtctggccctgttcagattcccctttgccttgtccacattatcttcattctcttctctgtggcccagcctctcttgctctgtctgttacatacttaggccatccagttcttatgttgaatcttcattataatttgcagaaatgacttatcctgcctacacagtctttactggttggagttctttgtgagatgcctgacaactcagaaatggccactgtcttctgtcccactctcttctagggcctctagttttcttctcttgttcagtctctatctactcatcgagtatttatcacagctctgtcagttaaaaatattggaaactcaactcagactgccttaggcaacaaaaaaaatgtcttgttttactgaagaatgcagggaaacgcagaattcaagcagcgctggatcaagttccgtgctctgcttcctctgtgtgggctcctgagggtgccattcccagccctagggggtggtgcctrttggcccatcctataaccattcataacaactcagattatagagacttgggtgaagtgttcatctttgaaggctggtcaaccccactgaagtagcagggactgaaagtagggaagggctgggtttccaaaggttaatctaagtgttgctacccaagggttgctgtgattcgaaaatcataactggtcaagtgtggtggctcatgcctctaatcccagtgctttgggaggttgggcagtaggattgtttgatgacaggagctcaaggccagactgggcatcattgcgagaccccaactcaaaaaaaagtagttaaaaagacattagccatgtatagtggcacctttagttctaggtactcaggatgctggggtgggaagattgcttcatcccaggagttggaggttacaggttacagtgagctatgatcatgccactgctttctagccttctagcctgtatgacagagaaaaagaccttgtctctgaaaaaaaaaaaaaaaagaaagaaattgtagttgtcccccaacataacagaatccctgcctgtgagtctgtgggccttaagtgtggcatttggcccacttgcagtttgaatagaaagagggccttacactgtgcagaaacatgggcatttcagagcacctttgcaggtgtggaaactcaggacttttgctatttagtcatctgacttcctctgccctgggccacctgtaacttgctatcatggactaaataatcacatctctctcagggatcacaccattgtctgactacagatattcaaggcaacatgtgtgctctgtgatgaagacccagggagctgtgcatccccaggttgcataggtggagacttggggtggatatgcgttcttttttttttttgayggaggctcgctccttcccccaggctggagtgcagtggcgctatctcggctcactgcaagttccgccttcccggttcacaccattctcctgcctcagcctccagagtagctgggactacaggcacctgccaccacgcctagctaatttttttgtattttttagaagagacggggtttcaccgtgttagccaggatggtctcgatctcctgacctcgtgatccgcctgcctcagcctcccaaagtgctgggattacaggcatgagccactgtgcctggccggatatgtgttcttaaaaaactaatttgaagctaaggctggacaacccaatagcttgagattattcatcctccatgaagctccgtatgttactacaaatgcaaaagtacaaatgtcactacaatctccagggaactgaaatatttctgccaaacgagtgttcattctatgtgaccaagtctctgtaaaaagctttggatagtcagttggatagtcattatttttctggtggcccccccctttttttttttttctgagacaaggagggtcttattttgttgcccaggctgragtacagtcatgtaaatcatagcccacagaagccttgaactcctgggctcaagagatcctcctgcctcagcctcccaaatrgctgagagtacagwcatgcactaacatgcccagttatttctttaatttttttgtagagactgggtcttgctatgttgcccaggctggtctttaacttctggcctcaagaaattctcccaccttggcctctgaaagctctgggattagaggcatgcaatacaatgtacatcttggagtttcttattaaccaattggagtactacataaaatgctagcactgtttgggatatgaatttaagaactgtagagaaacaaaatgatcttgttttgaaataggattagcttcattcacagtgataacactgattacttaagctgagtaaggtaccatattaagctcttgaaaatattgtcccatttaatcattctagaagcccgtgattattattatggtactattattaaccacatttgactgatgaggaagttgaagatcctccagattgaactgctggtgattcacagaaacatgatggatgatcaggtccatcaaatgccagaaaccacctgctgggcactatcccccaccccaaagccatgctttcatgggaatgcctctggcaagttatgagaacaatttactcatttaaaatggccaagatttgcaaggcctacatctataagtcttccagttttttgaaatgctagcagatatcatgcrctcataaaataatrgcccctcagcaaagtaatctagctcccatgctcaaggaagtctttggaatccaacagaccaggtttaaatctctgtttggccacctgttggctttggagaaggcacttctcctttgcagacttagcatcatcatggggatgatcgaaaatacttgtggtaccactgggtagaggaaatgagataaagcaggtgcagggctcagcctaacacatgataatgagtgtcttttctgttcatgttgttatgcttcttgtcattagcacttcaccttttcattttctgaaaacattaaatgtgggacaaattccataaaatatttgaataattgcaaaagtgtatcctgcaaagttgactctactgtgcaaactgaactgaactgcttctttgacaggtgatgcatgtaactttaatgtggtctataaatgcaggttgggggtatctatgtattattagaaaagtttgagtcatactgtagtagcagatgtggcagtcagagaccacagatgcaaactgtgaggatcttatagctattaaatgagattctttgcattactatgaaaggttttagctcctgtgaatattctagaatctctgaacattctggaatctatgacattaggattgaaaggcccttagacatcattcaggccaggtctgtcatttcgttggagattctgagatccagagatgggagtcacttgctcaaatcaatcagttgtcttgagggcttctaattcccactccactccagytcaggcaactggaaaaaagtacattcaaattcccactccactcyagttcaggcaactggaaaaaagtacattcagcttcacttttgaagggtgggattgtggtgagattcatgtccatttggtaaaatagctgtccagtccatgctgatgagcwgctacaggaccttccagacctgttgctttctgtccatcaccagtagcctcatggctctgaaggccaaagggcagacaactttctcctcccctaacttggattaagatatcttaaagctgagcaactgtttccttatagtcctggctgcagtgggtaccctacacattctgagggtgtagagagaaggtatctttctcaaacattcatgggagacttggcttattcaccccaggaggtttggggccaggcccataaggcccataaggcaaatgtatccagggtgactctgtttctgctccccagaggcgaaaatgtggcaacatcaaggcagccaacgcctgggccaggatccaggagcagctttttggggasctgggcttgtggagccagggggaagaaaccaagccctgttccccatgggaactcgactggagagaaggaccagctcgaatgaggaaacgcatcaaacgcttgtctcctttggaggccctgagctcaggaaggcacaaggtaggagtcaggcgcagtgggacagtgctggttccaggtagggcctgataggaaagcagctcctgagcttccccatcacatgttgtttatatcaggctaagataacacatgcagttaaatgtaggagagtcccaaaatttattctcaatgccatttaagaggagaaaagcatcactaaccctcctaggtacatagcagggacactgtaactacagcctgcatgaatgaataaatattgagtgttgagtggtgagtggttcttacctatgctgcaggcacagccctgtgctgcagtccacacaagtcctgtggaatcatctggatgcaagtgcttggaaagggccaggggaaggctattgtctgctygcacaagttacttgttattgggcagttgtaacccatactgctataagcattactgcaaatcccataacaaattttacgatgaaaatctcatgaacttgactgtttctgcaattttgagccagtgatccactcattccaaacaacattgacttcccaagcaacagaatctgggtagtccctgggagtttgctctaatgaagcttgaactgtgtcgcaaactcttattttgccttttaaaagaaaagaagccagttggattcatttggtagtagatataggaaatctgttaatagtttttcatgtctttattgaatgatcataatttaaaatatcctcaaaggcggccttccaaacaccagaatgctggatttttttcttctgcattcatcacaagtaacaatgttgagtttattctctcgtctgtaacctcagcatcttttactcatgctaaaaatcctttgtaaaatctaatgaaaaaattagatttcatttattcagtagatacttaaattttctaagtattgtcaataaacatttggtggtgtgtagtattttccctcactacattttttaggaataggaagcaaaaaaaaataaaaaataaaaaaaataagtagcctgctcactgtgctggtgacaaagccaagggctggctatgaaacctggtctctggtctctggggctgtccagccctggaacctcccctggtcccctctccagggtgtcctacacagagacattgaggatgctatctaatcccatctgggcctcttctttggtaattaccgtaagtcctacttaatggaagattgtgggttttttcccctttgactcaggaacattcatacttgcattttattgtggtcctttaggatttagtgtttctctccctttgcatctgagtcttgcataatttgaaggggtcacatgcatgtgcgtgtttgtgaatctgtggaattggaggtgagtgaagcatagatgtagcatccaggatttaattttycttttcaatgtccttatttcaggaaagccaagacaaaaatgatcatatttctcaaacaaatgctgaaaaccaaggtattcagtttatctattttttcctttaatagttaagctaattattggttttatttaatattttattaaagatattaaattaatattttagaagaggaaaatgctattgtagccagccctgggacttattgttactgcacttccagagagaagacaagtcgatttcagccctagacacttgttagggaaaacattttctattaaggttgcaacaataacaatttttggggagaaacagtcttgtcaatttgctatatcagggagatcttaaaagtattcccaaacaatttttgagacagggtcttgtgctgtcacctaggctggggtgcagtggcataatcacaactcactgcagcctccacctcctgggctcacacaatcctcctgcctcagcctccagagtagctgggactacaggtacacatcacaatgcccagataatgtttgtaatttttgtagagatggggttttgccacattgcccaggctggtctccaactcctaagctcaagtgatccacctgccttggcctcccagagtgctaggattatagccatgagccagcacacctggccaatgactacttgttactgctgatcaaacttttctcatttcctgactaatggatttgtattgagcttgctaccttgcctgtctgcagtaatacaagcccagaagtgaggatcttgggctctgatccccaggtgatttggggtcttattgtggcacagaggataggatgatattgtgatacctgtttgcctctcgtctctccaccccaagccctacaactctcacatggaatgattgcctgcctgctccagctccagaggtgggagttgcagagagtgcagtggtggaaagcatgaactgatctttttgtggatgatggccatgggctgctgtgtcctctcattcttgacatgcagagcccctgggtgtctgtgaccctgggccttcatggtatttccagtatgcaccctgagtagggagctcagccaaaggagaaaaaaggtcctgtggttctccaccatgcctctcctacacacctctccctgcatgggggaaagctatgagggtttgcktgagcagcagacactttcaatcatccagtacagaaaagataatgaaagtaaatggaccaaattgtaaacagtggagccaaacagactagagatgaaaaaaccagacccttatcccagagagactttattcagattctacctctagttcttagaagccatatgatcttgtacaaagtaattagcctgtttcagcttttccatttgtcaagtgaggatgaaatagtatctccaaccaagatgggacaacattttaaaaygtcatcagaagtatctggcacagagaaagggcttactaaatgggacctgttattattagcactatctctgggtgcatgggtgagatttgttttatttctcacaacttcatatcttttccaagttttttttacaataaaaggwtattgtttctatcatgagaaaaaacagcaatattcaaagagtgaatgaagtgaaattcagagaaagcaaatcctagctgggcctctgrggagttgctttactgactaacgagggtgaatttggaaatgttgccctgtggtcactggaagtggctgaacagctaggcctgggcatatctgggccctccaggataagtcaactggaaggtattttgaccacaccccagggtgccccagatgtgtggtgtccatttccagaagcagtggaggggcacagtgagagatccacgctcttcacttcggccctggagccttgctgctccttggtgatgtaggcacatgctgtgcaccggcccttaccatgtcaggtggctcctgtcaacaccacgtgtccctttatgctgctgcagatgaactgacactgagggaggctgagggcgagccggacgaggtgggggtggactgcacccagctgaccttcttcccagccttacacgaaagtctgcactcagaagacttcttggaactgtgtcgggaaagacaagttattttacaagagcttcttgataaagaaaaggtaatatamcccattgcaatagsctttaagatttttaagttagytgttaagattgtcagacaggagaaaaccaagctttcgccacttacatggggaatgagatctccatttgctatgaaaactttcaacacaataatcagtgaaaaaagggatagattcctaaatttgttggcccagagaaagrgtgcaaagggaagtctatacatcctgcatcaaaatatttaataggtgtaccacaaactgttaagtgaaaaatactctaacttcctactttgaccttcataacaacctgaaaggcaagtttcaagttgagaattcttgatcttctggcagttcagcatcttggccccctgtttgtggcctgaccaccctgagaggtcccacaccttgaggggtcttgggtgcatgtgtttggacaccccaacccatatatccgcactgtccctatgcctcggcctcaccttggccaccactcaagcctaggggtaagcacacttgtggcaccattagccttcaaaagggtggctctggggatgaagtgtacaggcccaggaggcaggctggggaccaggtggcagggaaacccggggtcctgggtgcctggagctgggttggcggagccccactcttcgtgtgtgtgtcctcttggcctggctggggaggtcccagagaaggacccctcttccccaagtctaagaatgcaatggaagatgaagcacatgtcttagagtagaaccgacctcagttctagtcccaacttggccacatattaaaccgcatgtcacctaaccgttgtcagcctcagttttctcatctttaatgtggagttctggccaccatctgataacattctgctcaggcttaaatgggccaatggaagtacagggactacttcagagctgggcataagagaggtgctcatcaaaggtgagttgttttccctttctgagggttgggtggttgaaggcttggtggatctcagggtctctgggtgaatcgggcttttccatagggatataagtgaaggagatacccacagaggagcaggcaggctgggactggtgcgccacaggggacacacagagataaatgcacgagagctggaggctagtctggccccagggtgaatgggagtggatctgaaccaagacccagggactgagggagagcctggacctccaggaataggtcctaggctcagagaacctgggaggggcataagcaaatgaattgcttatgaacttgctgcagaactttcagcaaattgctttgctgttttcagatttgggtcacagttcaagcaatgtagtcctgtaacaatgytgtccttatacctgcataaccaaagcttccagacacagagcacatttccatcatgtgctccaacacacctagccatcatgcctcctcatgcaggtttgcctacctgcagtgccctgcccacttgacccctgcaactgactctctgaagctgatcttgactgctccctgctctgagacctggagaactggctggagaactagcttgttactgtctgtgtcgccccctgcatcacctcctgccttgctgctggcacgcagagtgacctcagcgcttcacctgtccacctctgtcactatggatcctccatacaggaggaaaccctgttgtctaaccacaggcatgcctgaagcagccagtcagtcaacactgatgaatgacgtgctaaattcatgtgcattttattttgataatggaagtatcatatatctactaygtgaaattttgataaatggatattaaaatatrtaacacatgtatgcataagtgtatattcataatatccagttgctgaggactaacggcagatcataacagttgggatatatcaatatattaatatgctcatataggtaagtggatatttagtaaataccttgtccattgaaaaaacagctaagacgtcaatgctttctttccttaaaaacttttctttgctttatgcccttaaaggagcagccgttctcaactgggggcaactctaccccacaaggaacccttgccaatgtctggagacatttttaattgccatggccagggcgagaggatgctcctggtgtctagtgggcagaggccagggctactgctgggcaccctacgttgtctatggtggcaagtctgagaactgtgtcagaaaggatccatagtaaacagatatcatgctccagctacayctgcctgctttcctgattatgtggtgtctccatattggttcttttcattgctttaataggagaacaatggcagtgctttatattcgctttctatctctgccagaagaaattaccacaaacatagtgattttaacgcaatgcacatttattatctcgaaagtcttggcacagtggggctcagcagattctctgctagagcctcagatggctgcagccaaggcatttgtggggcctcatgtctttccagagcctctgagaaggcatcctttccaagctcgttccagtgctggcagaatccacgttcctgcttctgyaggtctgagctcctgttccctgcctgctggctgccagggttcatctgtttcttggggtgcccacctcccttaccctgtggcccttcctcctttcatttcctgcagtgggtggtacccttctcacccttcatatccttcttgccccctctgcctcccgctcccccaacaccacctctctgaccaactctgctgctgcctagggcgcaggggatggcactaactcacacataatccagggtcacatccctgttttaaggtcagctgattcgtaaccttgattttatctgcaaagtcccttcagagcagtgtgggtgttggatgggacagcctcctgggggcttctctggaatatgagcaccactcaggctgctgccccccagggcaggtccttggcctcctaggagagcctttgtaggtggcctgactccctcaggcatccaaggctggcctgggagttttcaccctggctagrctgaagtttatggtcagggacccgagtgagtcccagcccsgcctcttgcagcctgcaggtgcctttgacacttgtcctgtctctgagagtcttgtttttgttgactgtccaccaggtgacattttcctcagggatcttgctgggggagcggcaagagtctgaagcccccaggtgactgactttccagcctctgaagcaggacagaaccaggaaggggatcctctcccatctgcccctccctgccttttgtttaagtttcagtcttccttggccttcccgtggctcagcgggaagctgtcagaaatgccacacactgtttgctgtgccagtggggatccgcaggatgtgcagacaggagcatgtggaacccggtgggcggtcrggaggggaaagagcaggagctgtcctgcttccacttggcacccggtggccagtacattcagaagggagggaccctgtgtgaggttcggctcctggcccagaggactgggcagagtgacccttgccattatctaggcatccgtccttgcctgagatgtctctatgcattttatggggctatgcttgctgcctctggcttcatggggaattgtgggaaaggctggctcccaagctcagtttccccagggtcagtgaagccaaaccaccaggcacgcctgcttctggagatgcaggcccggggaggtgggggcagggcagggtccctggtgaggggagggtggaggctacaggcaggggtggggtaaaaaccctgcccaattctaattctcttgcctccacttacaggcctagtgaccaggtaagtaagagaaccattccccagcctcctttctgttatctttagaatggggttctactcctggtctcactggtttgtggcaaagattgacatggggctgtgtctctgtctgagactgtgccctgtgaggaggcagctctcagtctctggcatctgctgttactgctctggctgttgctgttcctttcatagccccataggatttgttctcactctcccagaagtaagaaggggcgttggaagaaccctggtacctatggcatggcccaagggccgtgtcaagggaaggatgaaggatcctgttaagactgaggctcctgtgaggcaaggaactgtgtgtcttggggaaatgctgtggggagtgcttggatagatgggaaactctgggggtctccatgggtctggttgtcctgccgagatggtggaggatgagacagagggtcacagtggagcccatgagaggcctgaccagctggaatggggttcctgcagagtgccaacactcaaaccaaacacaaggttttgggaaaaagagggaagttgctgggttgaggcctggactgatgtgtggtgaaatcaaggaggtccctaaactgaaagcaccaggcagggaagaacataagaaagcaggccccaggaattcacatgaatcagaaaaatcctcgaaccagaggagcacccttctgctctagactggagagctctgtggagtggggtcctggctggctggtgggacatatggggcctctctgtggcctggcacttctcctccccctcacacctccaccagccaggtccacacagtcccatgcccattcactcttgkctcccagcctggcggcctcctgggtgaacctgtcctggtgcgcccatccccagcatactcccaccccagagcatagctggtggatccatcccctgggcctaccccagccccctcttattgcctgactgatgatttctgagccttcctatggtttctctgaaggcaaggagagacttagcttcctcctcgtcccttccttccctgatacatagggtgagtgcttgggaacaatctgcagaccaggtgagctcagcctgacagggcagcaggaatcaggaggycctccaggggagccaacctgcagccaggcctgggtctgctcacatgccttaggacccagcttgagggagggcatgccctgggggaacctgggtcttgggggagcctgctctggggtggggagggtcttgactggactggagcaggctgccacaacaccaccaccatggagggagcagccagtcatttgtgcccaggagggcagcttggcacagggcaaagtgcataggctggtttgagaacctcattctgctatttgtttgttgctattaatattattattagcaaaatgtcaacagctagatgtcagaagcccttgccttgtgtgatcttcatgcactgtctcattcagcctcaccatggtcctgtgaggcaggtgtgttagtccatttgagttgctataaaggaattcctgagatggggtaatttataatgaaaagaggtttagttggctcacagtccgcagggtgtacacaaaacrtggtgctgacatctgcttttggtgaggcctcaggaagcttccagtcatggtggaaggtgaatgggagccagmgcatcacatagtgagagaggcagcaagagagagagggaggaggggccaggctctttcaaataaccagatctcagctgaactctcggagaactcattcattacagcaaggacagcaccaagacatttacaagggatctgcccccatcattcaaacagctccctctagcccacacttccaacacttaaggccacatgagatttggaacaaaayatccagactgtatcaggaggctttgttatttccattgcaaagatggcaaaaacagagcccagggtggctactcactggaattgctaggatttgacctcagatctctcttattctcagttcatgtgttttcgtyccctctctactgcctcccagctcactgtgttggacaagttacataacctttccagcaccctgtccctcagcagccggctgttattgggcttggagttgtggctcctggccccatgtkctttctctataactgttccagttaaagctggtgcaaggaggccttcaggtcyctcaccaacatggcatctctgcctgggatgcaacatgccaagcaggtgcctacctgccctcctgcatgtgcctggagggcccctggtccactgtggccttatccctggaccactatggttttgtgtcaaggacaggaacttgaggccaaggaaaggaggatgggtgcattgattgttgacccgtgaacatgttcaggcaaatagaaagtttgtgcaaggggtgtgtgtgtgtgtgtgtgkgttactctctacattccccaggctggtacrattagcctatgttgaggcattttttagcaagtgttggttgtaagctgggacttcccgtaattcagatgtcattgtgagactttgtgggccttgtactttttctaaatttctaagcgaaacatgcccacgataggggcatggcaggactgtgtgcatgctcctacaacagagtccccactcctcctcccctaccrtctcagaaatgcttgatcatatggcctttgctggacacatggcacaggagactttccagggcatgactgcttttcaggcatctgggtggcatgcctctggcagaagcctctggagctgcaggcatcatcctggccctgggggatgctggtggtgccggggctagggtggcagcagcttaactcatttctttgtgtgaacgttggagttctggttgcctctagtgatacctgggatggtaattattcaactattctgtgccacctctgcatcattgattaatgattcccaggactacaaacgcatttctctgcaaacagctctgtttgacttgaggagtgactgatttaatgcatattaattgtgggctcatgccagttaccacgtggctggggatgtcccttgtacagcttccagaaccagtccagagtcagtcctcaagtgaaggtttgcttttgttattgttctttgattacatgaaaaattaaacatctgatttttttttcatacaaactcaatgtaaaatatgagtttgaccttggtagaaatgatccgctcaaagggaaagacattttcctctggattgcagagagtggcatcttctacaagctcctcccaggtatctttagctgaggctgtttgtagaaggtgagggtgggtgttaacctttatatgcagtaacttcctgtctttctgaatctccatgactttctgaaatgmaaacaacacatgtcattcctacttaatatttctgagacgctggttagcattcttcatatgcaaggccattccagagctggccttgtagtttccctggactaacttcccttatccttacacatgcgcataaacacacacacatgcatgcacagacacacatgtgcaaccacatgcacacacatacatgtgtgcatacacacatgcacacacacatgcacacctgatgcgtgtacacatatgcatacacatacacatgtgtgcacgtgcacacacacacatacacacccctctgactttttaattatacagaactacctataatttccaaaatttccggctggttcaatactttgtgccttggaatgctcctcccctgtttttttatctttgtaactcctaactccagacttggagtcacctcctcaggaaccgtttctctggtgtcaccgctgccgcctcttccatctcagtctgagtgagacacactcctgtgtgctcccagagcacctgtgcttttccttccacactgctggragagctgatatcctgctctctttctttcctgttaggttgtaaacatcttaaaggcatgtcttattttcctttgtgcctcccagggagtggggcatatgctaaacatttaatatgtacctgttaaataaatgaatgaacaaatagatgagtgaattatgggcaatatgctgacaccagatgaaaccttttttttttcttagcctagctggtgcccaacggtcrgtttcttagtgtatgggcttcagatcacctgcatcagaatcttctgggttgcttaataaaattcacattctagggccctactttgcacctgttgaattgaaacttctggggatgtagcctgggaatatgaattttatcaagctgtgcaggtgattctcatacatactaacttttcaaataaatgccccaaatccatgagtccaagttttacaatattcagagctaccctggctaaaaatgcgctccaattttaagcagttgccaatgatcagtccttagtgaacacaggttatggtgagcattgtgctttgaacagtccttgggtcttgtaacatgtttcacatttcactggtgcaaccaaacaagagcaaaggtattgccatttccacctggtcttctccatgtctgcagagaaagattggaggtgtggctgtctgcaggctgtctgtggaagtgacacatgcaggcaggcagggggcatccctgctccttgtctcaacctgagatgtacttacgtgaaaagatcgatgcatcattacattcctttctatatttcccaaattaatatatatgtgtatatatgtaaaatataaaacaataaggagatgttctctctctstctctatatmtatatatatagatagataggtagatagatagataaatagatagatagcatctccttattgttttaacatacattcctttgattattagtatgacgaattctctgtctaaatacatttaagatagaaaaaagtagatactagagctcatagatgaccaaatatagmcttttgcctctttgatacttgactttttctcagcaatctgtgcttttctaaaaaataagaatacttattccatatgccaatactattagaatgtattcagaacaaggttgaggcaagcagagatgtaggaagagggcagatgataaatgggagcagggctaaagctttctttgcagcagactcactcaccgtacacacaaacgtaagggaatgcatatattggcagctctgttgctgggtaccttcagtcacctctctggacctcagttttcctacctataaaatcagggtatttcaccaagttgcagactgctaatgctagagaaaactttagagagtatccggttgaccttgcccattatagatgtaccactgaggcctgactttagaagaatgtgctgctgtgtgctaccactgaatgtcccagtagattgttgtctccctgctatggtttgaatgtcccccaaaattcttgtgttggaaacttaattgccattgtaacagtattaagagatggggtctttaagaagtgattaggccatgagagcatgaccctcatgaatagattaatgccattattgcaggaatgggttcattattatgggagtgggatcctgataaaaaggataagttcagccccatttctgtctctgtcttgcatgctcacttccagcttccgcccttccatcatggggtgaccctcactagatgccagtgccatgctctgggacttcctgtccaccagaaccaatagccaaataaacatttatctytataaattacccagtctggggtattctgttatagcagcagataatggactaagacaccttctaactttmgctccagcattttgttgatttctggacaacctgtttgtcatcatacacagagctagctgtggctactttcttagttattttacccatcaagagtgctaatatatcattcagttgatcttaaaaaagctctacttatgaggcaaaagttctactctttaaagtgatcaatagaatcatggcataagggatttcttaatcatgagtaaacttagggwtggagccctcctagggctaatttaaatggaagagcaggtaatagttcacttgggttcattttctagtttttaaaatgccatttcttttctagcagaatcaatgtttaagctattaacccagctctcaccagacatttttcttgtggtttggcttattctggttgatacttaagtcttcccaaagggaagcaccagatcataggcatgtgctctgagaccctggtgcaggcaccatggaggctgtggtgggggcctggtgtcacagggaggagagagggtttggaggcacataggccagggctggcattgcagagccacatcatctcatcatgtgaacctgaggttggggtctctgagtctcatctgggaaaaggtacaataagagaaaaagtttaagcagcctgacataatcttcctratagtcctggtgggagtgtaaattagtgtcaccttgtgggagggtaatctggcaatggctacttgaattaaaaatgcccatacccttgacctgcaattctgcttatagaaatttatgcttcaggccaggcgcggtggctcacgcccgtaatcccagcactttgggaggccragacgggcggatcacgaggtcaggagatcaagaccatcctggctaacacggtgaaaccccatctttactaaaaaatacaaaaaattagccgggcgtggtggtgggtgcctgtagtcccagctgctcaggagacygaggcaggagaatggcatgaacccaggaggcggagcttgcagtgagtggagatctcgccactgcactccagcctgggcaacagagcgagactccatctcaaaaaaaaaaaaaaatttatgcttcagatttacttgtgtattcaaaatgacttawctgcaaggatggtcattgtagcattgcctgttatgtcaaaacatttgaaagcmacctgaatcaaaaaaggactgactggtcaaataaactgtagcatatccattcaagggaatagtctgcaactattaataagaattagacagctctatgataaatgatttggaaaattatctaagatgaattgttaagagaaaagtctagatgcagagcagtaagcatataaatgttctttgtgtaaaaaagaatatgtataaacatgctaatgtattcatacaatctctttggaagaatatccaataaagtggtaatggtggttgcccctggggaagactactagagaacctgggaatgccacacagttactcaagtcccaaagtagacatttatcatttatcctcaattcatcctccgtctcctcccctcccctcccctcctttcctctcccctccccctccctccctctttccttccttccttcctttcttccttctttccctttccttttcttttctttttcttctttttgctttccagttagtccagtagcagctcctgtcaattctccatcttcttgtttagatacacccacttccttccctctgcattctgccatccatcccagaccactgaaatagcaacacaacggggcaccctcctttcagtcttgaccctttctaatgccatctccacccagcagtcagtgtcatcttttrgaaacraactctcccatggctttctgttgcaaccacaataaaacccaagggccatgctaaggtacctaagaccacctatgatgttggtactcctaatttccaacttcatcttagccgtactgaccactttctgttccccaaatcagcccttcctgcctctaggcccttaactggatgtccccgttccttgaaatgttcttctccaagcttttccagaacttacaagtttccaaccttcaagtttcagggtctatgtcctcaccaagaataatgtccaagaacagaatggtgttctcgccaagtttctccctgcctttgtcatgatcactctggtttttctctcttagcatgtatcacaggttgtaatagttggttggttaaaatcccgctactggattttaagccctgtgaggctaggattcttgtatatcttgtccaccttatccccaaagcctggctcagtgcctgccatggagcagaggctgaatccgtaactgctgaatagatgaccacctggatgaatgaataaaattggaaatgagtccactttggactctggcctggaaggtggctggagggccagctcctctgacaaggtagattcagaatagaccaagaaagccagctaccttcaccaaccttgtttacagaaacagaggctctcggctggtcctagcttacgaaaaacagctcagccctgacttgccctggatcatagtggttaatacttatcttggaacaaaatgctcagtgaacctttgctttctgcccttggctctggctttcackgatcccatttggtgcaggagttggaaaactggtcttcagggcaccactgtggccttgtcattgctcccaaaggtgagcagggagctttgcttcagtcccaggctgtgtcacttagtaggtggctgatctttagtgagagtcttatctcctggaacctcttttatttttttttctcccaaacatatctattctgcttttgtataactggaattagcacaaaattaccatgagaaaatgctggcctcggccttattcttggtccctttaggctctcatgttctagaatttattgattcactcacttgttcctttagggtttactatgtaaggacccacttgatccttaccacatgcagaactctgggtcataccaagatattgtcatgggtcaggttctgcacggagaaagttgattgggaatgaggattgcagggctggrccagcggagaagtgcaaccacaatgtagtctcagcaaagacttcagctgattccagagcagctctaggtttgggatggttgtttagagttttcttgaattgagccagaggggctaagccttcctactccacattgtccagttgttgggtacagactgcccctgggaagaggatgtgaccttggaccaggggctgtattcagctaaggcaattctggagaactgccagcatttccagcaacaggggaaatgctcacctcggtccaagaggaaggatctgggcagagcaccgtgcatcttctgcacatgtttccttggccttgcagagatggcagtacctgtcttgcacttgtggttctaggcacatttgaattctagtcctggctcaaccatgtaytggctggtccctggacaagctccctctcctctgtaactgagcgatgtcttgtacctggtgaactttcctcacagttaactgtgggatgctttgcatggttgtagagggccttaaagtgagagaaaggactttgatgtgctgaatatagcagtaaacactcacccacacatcttggtgggagcagaggtaggcttgagtagatcagacaccagcccaggtggggtgtggtagtgccacataggctgtgaagagcagtacagtcctgggacagcgggactgccattcatacaaggcactgctctcacctccaattgccccatggatggctggtcactaccctcctgtttccccyaagaatcatgggcatgcttcctgtgcaccacctgactctgccactctctccttccaggtgacgcagaagttctccctggtgattgtgcagggccacctggtgtcagaaggggtcctgctttttggccaccaacacttctacatctgcgagaacttcacactgtctcccacggswgatgtctactgtacccgtcactgcttatccaagtgagttatycacttctcccagcagattcttccctgagccccattcatccttaccagccgcccccactattccccttctcaccttgttcttacagtgggcttagatttgggcctgaaactgagccatgagataaaacagaaggacctgcaggcataggccatccatggccatggttcccctaagcagtgatcaggactgggtactaatgtggcagctcctcacatctcccctaatgtggaatgtcaggactcagggatcagtccttcaattattcgcatggctgaattcagtcgccgtcaacttactcactcaacgacatgttagttgctcattctgcgtgagaaaacaggcaccgcccctctcttccgagggacttaatgcaatcggcagcatgcacaggttctttcagaaactgttggccacacactatggtcgtgggacaaaatcttcagggttcaggcttggagggatggcctgggactggagtggtggggaagagctacctgaggaagggatcaagatctgggttttgcagaatgggtgagacttgggaagaaacttgaagtcatttttacacaagcaaatacaagagacctttggcaggaaatgccaagttctttaggatcaagtgcagttggtctatttgggtacagtcagcccttattgtgcaattctcctgtgtttatgaagtaagrccattcaaaatcaaattgactgagcttttgccaaaagtccagttgtcaagtgtatgttttcacttgatcattgtctttgaagatatttggatgaagakttcttcrtgcagagataggccttgccttttccagttgacccaggttcagataatgacaagatgacttcttagcccagtcgctctcaaactagctgacaccagcatagcctggagggcttgttagcacacagatgcctgggtcctgccccaccctagtttctaattcagtaggtctggggcagggcctgaggtttagtaagttcccagctgatgctgattctattgctggtctgggaccacactttgagagctactgttttaggctgctgactgaggagtccaagtcttatctgccaataaccaagaactttaacttccagttgtcctatcacttccaacctatgtaaggaagaaagagttgaaggagtgcggaagagtagatgtcagcccaccttggttgatttagatcaaaatgctttaaaatgcttggcatttttctctctgctaatttccatattttattcataccaaatgttcaccgattgctgtgagtcttctgtgcttctccaaggcaggagaagcataattaatacttggctcctcatcccatcttattgctcatgttttattgatactgatcaatatggacaatgggcctgcagccgtgcctctctgagagcggatgaaagctttctactctatccatatgcacggtgtgcccctgtgatgactcacataatccactgctgtgctcttcacctctggtttagatagtgttagataagatcttattgattaggtaaattgtgtttatgaggtgtacctaatcatgatcaaattcactatatctgcacttttaatagaagcccagtggtcagattttatgtactcacttgatttgcaatgacagacaagggagacttctcatgtctgaaaatgtacttctctagaatgcaagcaggagtagagtgagaacaaattactaccctggaattgcactggggaagtgcccagatagttttagtcaccatacctcaaagaagcatttgttaatcagtgctttctctccagggtctcatctggtgccctaagaaactactagcattcctggagatgcagttctgagacagactattagatcattccagatcaatggggattaagtcttattttgaccatggagattaaagaagatacataaataaacttgttaaaaataaagctaagtcaaacctgaaatgtttctgtaaaagactgctatggaattgagtcagttgcacattagaccttgaaagagcctgtccgatgtaccataaaaacatccaaaatcagactcaagaacattacagactccttgacagtgactggaatttgcactttgcmctttggaaatttcctcagaaactaacagccttctgagaaggttagcttttgcttgtagtaagtccctttcttagctgattagggtggctgtattcatttgctagggcagtcaaaaactgggtggcaaaaaacaaacaaatgcacacacacaaaaaaacagaaatgtgttgtttcatagtcctagaggctggcagcatgaaaccaaggcaaggccatgcttcctctgactgctctagggaagcctccttccttgcttctttaagcttcttgtgtttgcagacaatcctttgcatcccttggctttgagatgcattgattcaggcacctggtcatcttgtccctgtatcttcacatcatcttccctctgtgtgtctatctccgtgtccaaattttccctttttataaggacaccagtcaggttggatttggacccatcccaatggcttcattttaacttgattacctctgtaaatatcctgttttcaaatacaatcacagtgtgaggtactgagggttaggatttcaacatatctcttttgggggacacggttctacccatgacaagggcattcaagctcacaaggcagagaatttgattaacttagtgggaacctaagtcatccaacaggctctttgtgatagagtattttaaatcagataattcttccccatcagtgagcagttttaatgcatcatttctgttttattcagttcaacaaatatttattgaaaatctgtcttatgctcagcactatggtggactccatagatggaaagagtgaattagatgtggactaaatcgggtagagagtttacaatctagtgaatgtttctgggtataaattccaggtataattctggcaacagtcaggtaacttcaaatgtgggccaaatcgaagtatgttttatcctgaaatccacttctactatcaaagaacaggtcaaccaatatcataactatcatttatctcactgtgatttatctagtcagaatattgacagttatcctaagcacatggacagtttttgcagatcctgctggctgttatgctgacgaactgtgaatggcagcctctgaactatggtartggctctacccaaagaatatggatcagctgccccttctacccagtacccttgactgcctgaaattcgattcattttgtagaacatgtagggtgtagtattgtcgaagactcccaatcacagctgtgtgaatgttacatatgatagacctcaatttggaagtcaatcaggggaatcaataatgtacataatttagcttttctgagactttgggtctttctgaggatccatcctctatatggctattcagtttctacaagcaggaggaaaatgactatcttttctcctaaaagctcgttaccattttccagagcattcttccatatgtcatctgtgtttcagagtcctgagttgcagaaacagtcagcacagagcaaactgaaagcagtgagccagtggtagagctctgtaaaagctagggagcatttctgcctccagggagaaaaggcactattgaaagagcatgggtgttagagttggaggacctgggtttgaaaccaagtttcacctcttgaggaccacatgaccttggaaaagtctcacctctctggaatgcagtttcctcatttatgatatgggaataaaaataagtcatggtcagtataaggtttccttatgaggatccaattaaataatgaatagggaaatgcttggcaggccagagagcatgacagtcacttagcaaacatgtcctgagctcaggggaagatacagaggacggagagccatgggcaaagacctgcgccttgtagggtctgcaggggagagagaacagccagayctgcagctaaggtatggagaatattttctgtggttcccacaagcatgggatgatgggagcacagaggagtggccatgtcatccccaccagtaccttgacctgggatgctgctagacctaagccaaaggtaggaaggagaattgtctctgtggccttactgggagtcagagatgtgtaggagcagctcagctgagatccagatagagacattaataatggacaaaggacctcagccagcagccggtttgtattaaagcatcctggcagaagcattcagaaccaaagcggtgttttgtgtttgatccatcctaccacaatgcggcttagaggagagggcctgggagggttgttctgagaagggtctgcagagagcctgagtctgcaacctcaaagcccagctgttcaggggcctaagcaaggggctcaggctgtgtctcacttgggcaggcttccctgctgcccagcacaagtygaagctcttagtactgcacatgctggactgccactgaccatagactagagaattccctctgggtctgtgactgcttggcctctctcaacttccccaagaagtggggcatggaggctccatgggctacattgtaggctgggccttggggaccacactgggagctggaatgggagaagctgaaacaatttcctcacccactccctgtcaccttaggctggggctggcaggaccaccttggggcaggggcctttgtagcccttggctctctgggcctgtggttggcacacaggcttcttgagggctggcgtgcttgggaggccttcgtttcttagtcctggcatcttatcagaatggctgtggttgtatacacaatttaagatgactacatgccccagatgttcagaaatgtaactgtctataacagaaatcaactttatttctgaagctcccatgtgtccagatgatgaaaagcttcatatgattagctcaaggcatttcagttatttccagtgtacaaattgttctctttgggaataaatatttggacaaatttattatcctccctttcccctcctctcttctgcttctctgggaggaggggtcactctgagatctttctggaaaagcttcctgcacacccctcataactctccaaggggcctcatctcgggactgcctgatgcctgctggaggcatgcctctgttcctccaggtgcccaggaggtgggtccctcatcacacgtgggtcccttctctgccttttcagtgagttccttatcacctctccaagattgcttctcactgctccaggcctggcctgggaattttaagatgcactccctacattttctctgtccagcctgggtcttgcaaactgaatgagctctggctttcaggaagttatttctgctgtgtgactgagcaatcgcttcagaattcagtacacctctttgtcctgggctgggtatacccagcagctcaggcctgtgcctttgtatggtctgcaggggagacagaccagtcagacatgccgccaaggggcaaaggatatttgctgtggttcctgttagcatggatgctgggagcacagatgagtggctatgtcatccccaccagtaccttgacctgggatgtggtttgacctaagccaagggtaggaaggagaattaccactatggccccactgggagtcagagatgtttaggggcagctcagctgagagccagatagctctcagggctgccgaagatgtcagggagacaggccaagggtcctgaagagctccctggtttgacacgagacatcactctacagtctcagtgagagcctcactcacctctgaagagacctcatcctgaaggttgccagggcccaggccaggctgggmagcctctcaggatgcaggcgctgtgcagatgagctctaggtgctgtcctcatgccttgccagcggcctctttgccttcctctgctccactccctcctcttccctgtggtgcctgacccctcctaactctggtttgcattcagtctcacagtcacctgacttccctcaaacctccctgccaagtgctctgtactccccaatcctgccatgaagggtctgagtcctgtcagtccctgtggcagccacaggccacacctgactcagttaccttgtccagcccctcagccctgccagggaaagaggtcattcaatacaaaacgagaacacctgggcagagggactaagrtgtgtggcacggcaggtatcctggggctgagactgtcacgcctgggcagaggtagctggcacagcgccaggctgggcatgggggagccagggaagagaggccacaggaacccacgagggctcctgggcatggtttacagtcacgcacaggacccatgaagccctccctgctggcccccactctcacccaggggccttctcaccccgaccctcataccctttgtcagcatcatcctggaaactgcgccgtcatattgctgtcccctggcctggtgaggctggcaccccaccctgttcctccagggcagggcagctttcacgtgtcagcggccagtgctagagctgacatgggcaagcactcagcaaggatttctcagatgagtagggctagcacactggttggcagtgaccaccgcacttctctgatgtgtcattggaaatgtgggtrgagctggtggagggcaggaagaagaagaagcctgcacgtgtcctcactctgatgtctgaacatgtgccctgcatgcctgtttccttttcagcatcagcgatccgttcattttcaacctgtgcagcaaagacaggtccactgaccattactcgtgccagtgccacagctacgctgacatgcgggagctacggcaggctcgcttcctcctgcaggtaagcacactgggtgctggcacgcctggggcctgcgagaggcagggccatgggacaggtggtccaggagccatccagagacacacctctgtgactcttctttgtgcctatgcacagcccagtgcccttaaggagacacccgcaagttccctgggcttgtggtggccctggtcccaggtgggagttctgacttctgctccactctgcagtccttgccgttggctgttgggccttttgctgtgtcttttaggatttagctgcttcgctgttttgctcttgacacagcccagagctgccttggagatttaggaatacagggcaggacagatacattacctcccagtagagctgataactgggagtagagtgccttctgccctgtcctgcccacaggggtaagacctcccttgctgacatactctccccctttctccccaaggtgctcgcctattgccaagctcctgcttggccctgtttstggggccaagtggtttagggatctcccagctgccccctccaaccaggatctttcagtgcctcacccatgccttcaagggcttagccaggcatgcaacagtgatggtggctcctttcagaggaaaagctcagccataagctggtcataacctcccacttctcatcccacttcacagatagatcacactttctagaaacatcacctgagcagcaaagggagtagggtaaacttcaggggcccccagtgacatcaaacacatgttgccttcattaccccaagctcagcaatagcaaagctgcatccccagtccctgggcctccagggcagctggcagaaaaggggatcctagggaccacgtaacaggagggtcaggatctcttcccaccctctctacaggatcacttagttccaaaggccagcaagagagyagtgcttggcctagatgaactagacatttttcatttgtaaatctattttctgtacgtaggtcattgattcatccagtgacccctcctgcaagagggctcactatcattctctgaaactgaagctcagggtggcctttaaggtgggggaattcctgaaaggccccagctgccctcctgtcaagggtttgccagcagctccactctagccctctaatgagcactcttcctccctctgctgcttttgcctgcaacacagttagttctcattttgcctgagcttcctgagggcctttgcagggtgaaggagcaggaagagcagagtggaagtagcagccctgccctgatggttctgggcagtgctgctggktctgggccaatctccacctcagctctgccacattagctcctgtgggcacctctctggtttccttgcccttcagtgagcgggaggccgtgtcctgcctttccactattatacatacagcactgagtacaattttaggcacaaaataggtactcaaaattattttttatgattatatgtctacctcacatgttatatagagtagcagataggtatcagtcagtggggttttttccccaagtacatggtgattgtttccagagggttggttcacctgaagtggtggaagccaaagggagagctttttgagcaaggccaccatttgtccatccctggattctcccaggagaaaggcagagcttggcactcaaggtatccagggcaagctgtaccctccacaaattctgcattcacttcctgttttgcacattatttatatttctatttgtagaaaaaaatccaagagtctcctgttcactagcagaggagagaaggtatgcaacatccttgcagataccttctctctgctcaggagagttaatgaactggactttgagaactcacttccagccaggtagatgcaggacaggactctgctattgggtgcagtacccacctctgagtctgaatcttaccccaccccatccytccctccatgtacaggtctcwtctctccctaactctcccttcagccctgggaattctctctccttggcctcatctcatccctgaggcttatcttataggtaactcactctatctcttattccaagtttattatttacatagcttggaatagaagggagttagagaggaaacaagggtgggagaaaaaaaaagaaaagatagttatgygaatttaatttaggcattaaggaartacccctgacaaaaactttactatgccagtggggccacatcaaaatggcctcggcaggggaccctgtgctgcttaagtctgtagatcaacccatgatgctgcccagctgcacgcactgaactagattccctagttcagtttctggtaagttgaccccctggctcacccatgccataactcagaagtgaaaawgtctgaggatggcatgggtgctttctctcgtgtctgcttcacgcttgccctgggagtggacctttcgcttcctgcttcaacagaactccaagctgtggtcaggccccctgccctcccacacattctgcagaagcaccccatccctgtcaccaaggtcttcctaccatgggaactcaaaaggacsacccaggaagggtcttctgacacggagacccgcaatgacccatttccagcagctgtgtcaccctggggcgtctctagtccacaaaatatcaggagcattaaaaggggcttctcttcacaggacatcgccctggagatcttcttccacaatggatattccaagtttcttgtcttctacaacaatgatcggagtaaggyctttaaaaggtaagagcttgaaaatcctccttctgaggaaactgatcctgaactgagagcagaggggcagagaacactcagctctgtgctcaggaaaagtgttctcaacccacagtgaacgccactcaggctgggcccagggaggcactgctggcctgcagaactgccaagtcatgaaatgatgtacaggaacaggcagagaaggcccttccttcagtcctaggaagcaggctccattttcctgaactgaagtggcatagaacaggaagtgagaaaaaaattacgcagctaccacagagttaaggaactggctgtttaatgggccttccagaatgttctggctttattttctaattttccaagtaatttttttggcttaatctttctttctgatcccagttgccaattttagttgctccaatttcatatttcattggaaggaattccaaacaactgatttcccacatgtgcactgaacatgtttttctccagatggatcagtttaagaaatctaagccagtgtgtaagttcttaataccatggttatttgtttttattaccattaaagttatagatcagtagattggtttgtagtgaatctagaaagaacagaaaggaaggtcagttcctcatcattatagaccacagagaggctgattaacagagggagtggttatgtgctgctscacatgggctggaagttctgaggtgagatttgatatcccctggccaaggagcccattttgtgctcagaaattcaagccctgccttctagtggccctgtggaactggcacccagggcccactactgcatccaagaggcagggccagggtggagaaaaacaactgtagagaggcttttgtgctagttctaggcgcayttccttggactcaggtgagcctgctcatgcggttcttccatgctgctgctagattgccccctaaaattatattcaaggcctagtttagaccaaaccaaacaagcagacatacaacccattaaacttgattcatttccccctatggtttctgttcattaaacaaagtttttcacagttgatctagaaatcttacacctccatagctcaggatgtgaaggtggcctaatgcagactccacaaccactacccactcggctcaaggagcctggcattaagatggcatttgtcctcacagcaacgcactggaatgtacagcaggattgttgacattggcaatgttgtcaactgcctggcccagaggcggtacctcacacacactgcctaagtaattattgttttattgttgtcattgttggtattaaggcaatagtgtgtaatgccagagagtgctgagggttgcctcagaggtacacccaggcctggtgttcacgacctgggggcaggatggagcgagggggagcaataatgagcctagcttcctgcctgactccggaaatgcctctgcagcaggagaaagggtcttgactctgctgatggaattatcycttcccttttcatgtagcttctgctctttccaacccagcctgaaggggaaagccacctcggaggacmccctcartctaaggtaatggcgggtagccatgctgtctgggcatggcactgccctggctttgatgttcctcctctgcctcatcccactctaaagaagtcttgcagagagcatgcccaacwgtttccctcatttttctctctcctattcctatacatccttcatcctactcctgaaattccttctgccagttaaacctctgtgaacwgacttgaagtctcacatgccctgtggctttttcagacccaagtggcagraagccatcctctgcctttggtgactgggcaggtggcacagaggtgtggagtcaggcccagccttggaggtcaggccctcccrtgggggtgtgtgagcaatcccatgctgtccctcctgtgatgagggtttctgaacgcttagaagctaaattcatacaagttggtgtgcgaatcagacattaatttaggaatctgtgctatggggcgtctctcccagtgartgaattgcttgcagtcccccccgccgccgccaggtcccctttccagctacccagttctctggaaggccacttagggatcagtaggtgtttttatttcagtcggggtgagaatagaagaaggtggtagctggttttctacaggaatgtgtggggaccaatcaagagggtgtccccaggaatgacattcaagatatttataatcagtataaaatgggtctcactaattccttcaaaattatttattaatagcttgtgatacatggtatttgcttgttgatggagcaacaagcaaatagaaaaaaaaaatcccctgtccttattgagttcacattctcaccaggaggacagacataaaccaatataaatgagtgaactataaagcatattagataattataagtgtaagtgtaaaaaaccaagcagatagaggtgggcattgaaatcttagatgaggtggcaagcgaagcccttatcaagaaaacaatctttgaattaatwcttggccgggcgtggtggctcactcctgtaatctcagcacttggggagaccaaggtgggcagaccacctgaggtcaggagttcaagaccagcctggccaacatggtgaaaccctgtttctataaaaatacaaaaacttagccaagcatgatggcaggtgcctgtaatcccagctacttgggaggctgaggtgggagaatcgcttgaacccaggaggtggaggttgcagtgagctgagatcgcgccactgcactccagcctgggcgacagagcaagactctgtctaaaaaaaaaggtggagaaacatgttatgcagttaattgagtaaagagtgtgtcagacccagggaagagcaaggcatggctgaggcttatcaaattggagtgcagggagttagttggggtggaggtgagggaggtcacaggggatagttggtgcaagattctcatgtcggtttttattccaaatagatgggaagcgttggaggattttaagcagagggttgatgtgaactgacatattaataagaatcactctggctgctgtgccaagaatagactggagtgrgtcaaaggcagaagctggagactagttaggaagctattgctggaggctgttgcagtaatccaggtgagagatgawggtggcttggatcaggaacatgaaagcaaagataatatgatgtgatcagattatggacatgtttaaaggtacatttgatgggatctgatgacaaatcaagtgtgagaaatgcatgtatgtgacagaggacttaaggataagacagaggatttaggcttcagcaattggaaaattaaatgaggatgatcagagaaagagtggctgtagggccactgtggctatctgaagctcagatttagacatgtgaattttgagatgcctatcatacatctcaaagrcatcatggagctattgggcatatgaatctggagttcaagagagaggttcaagtgagacataaatttagaatagtgtttaaagtgatgagaatgggcaagattatcaagaatggatgcacatggaaaagagatcagaggactgtgccctgggcacaccaaacttaccctctggtaaggacatgggcagagccagctgaagagatggggaaggagtagccagaaaggtagcagaaactgtaggtgtggaagacrtcctggaagccaggtagagtgactcaaggtgggagtggtcaagtgttgttggtaggccaagtgggataagaactgagaaatgaccattgagctttgtaacatgagagtcattgatgaccttcaatagactaattgcagtggctaccagcagaggctcctattgtgccaggcacttaccctttatagattgtggtgaagtgcaaggcatgccagggtatggtccaggggacccgggcagcagtgggtcgctggagttggggtggctgtttaccaactgtaatgggcatagtttaatagttcaacaacaggatagtcctaattgtgcatatctgctgaatctcagccctgctgatctcatattgtttatgtttcatataagcctttatgttcatacttggatttctcagcactgtttcagtacaaggtaaaaagctatttcaaactaattgaagcaaaaaagaggattcatgatagcatctacctgaaggtcaaaaatggtctggctccaggcatggctggaccgctaggcacaagtaagtctgcaggaagtggtggctctccctctctcagggaggattttacttggcctggctccatttctcataggcgttctcatcacaggggcaccgatgcccccaacagctccagactgacagtcaatcatgcaggaatcccaccacacaccgtacatgctctatcccggtaactttagcaaaacttcccaaactgtcattttccccagttaggttaattacatgcccatcccagaaccaatcaagtgttttcattggctggatcggagggatgtacccgcccagcttctggggatagggtcagtcccacccaactacatagaccaaattgaggggagtatggttccctgagaaaatcaaggttctgttatccacaagggggtgagcactaagggtgtcagcaaaagcaggtggccacacatggttccacgcagagggaagttccaagccgcagcactcatgggctgcagatggttttctctctccctggagcaatgctgcatcaatcatgacacacatcacttcactgggctccattgtctctgcagctcaccctttgatgaacctaktctgtaatgtcactcagtgacagcatagctgtccctatgactgtgggtagctctctgtccattatttgtcttttgtcctcagaatcttagtgttgccttgcctggaaacacttaccttcctccacataccttctactccaaatatagaggggcaggtagaggaggggcagagggaggaatgcagaagaggagcttacccccagctgtgcccactaagttagaggcccctcagaaatgattgccaggttggaggaagatgatgttttgtagatgagtcaaatgtctggagattactccttactcatccccaggttgatgatgacctgcaatgccaacctgtgtaccaccttgcttctgtggtacagttgagccccattctgattttatttccaatgtgattatttttgccatcatggctacctgatcccactggagcagggtctyccagggctatgctgggtcattcctggcacagtctcagcacagctccaggttggagacccttggagaagcttctggggtcatctaggaacagtgcttagtgcttcagaggaatgctcatctcagttcatggaaggagagcctcagcaaaatgcggacaccccgcagagtgctgaccctcggctctgaggccacccatgcagtgagggcatgtggcaagactgtgctaaataaacagccccgggcttcaggatcaagctgatttgggctcatagtaggtgcccagtaaattgtaatccttctgcctaattttagaatcacctgatgtgtgtttgggcatgttaacagaagaattgattaaaagcaggtggctctccttgctctcagctcctcggagtggccccctttccagcccttctcttgccagcccaattgtggcttcaggagctccagggtgggaaggcagtggtggccctcagccttaggagggcttggctggccactgacatatgcctggaatgaagctgatgatttttcttttggatcactggaggcaataatcatagaatgagtcttgaaaaatgcctagctgcttgttagtcactctaatgaatgtggacttcttacctataaacraggtgtgtgtgccgttctgagggttttcaactggcccatgacacttggcctaggctacagattttcatgccctaaaccttcagcttttgatgactcatgtggctcctttggacaccatcccacacatacaggaaaatcagagcttttggtaccagagtttgctgaggctttcagtgacaatggttgcctccataactatatatatgctaagaaggctctctgggcctgaattccaagtagaaaatacttgcaaagcctgcgtgaatcctgtcccaatggtacaggactgaaccttttgaagacagcatggtagcctgttcagacttctgtggggtgcaaggttctgcaagccgacagggccttctaacatatgccagctagagctgttggatgagtcctgctctgtrgtgttgaataccggcaggatttttgagatgtaaaaagaccaatcagaaaaggagaaatgatggcaggaactgcagggaaagggggcagctagctggaatgcacttgtggataaacacacatcctcacacttaaatgtactcatgcccttccagaaagggctacagacagcttcaaaattaaacacagggtacaaccatcctttaacaattacccaacccctttaaaggggaaaaaataggtgtggtcatgtggagtgagttactctaattgtcctgagactaagaaaactaaaacaaacaatcatattggcttatattattttccagggatagataataagaaacaggcttttgcgattttttttttttatttctggaacatactttctcttggtgctgaatatcaaatttggttcttctctaaaggattgtgggtaccaaaggtggcaattcctttttaataaaacatacaaaaagagtactggggaacctaattctctgtatyagttctctgcatgaatgggagcctaacattcgcacttatttttgtacaggcatttctttgggaagctaacaatacctggctcagttacattgctttctaatgacctcagttcatactgagcccagatttyagaaaactcagagaaatacaaggctaggatgcctatctgattctctttctctcaaatctctcttgggctcagcacatatttttggataaactggaaacatccaccatgtcattgaggcaaaagcatccccgggctggagaaagccactgggtgtgagatggtgcttgtattcagggcctgattgtacctgggtgtttgcagttcctaaaatcattcttaactgtataaattcttcatatataatrtttagaatgaaatttattttgggggtgcaaagatttacagttgaacattttcagtttattgtctcctttagagattatctttgaaaaataatgaaagacaaataayttaaaaaacctaccataagaacctatgcgattcccatgagaatatgaccttccatgttaattaaccacaccccagaggcaccacagttagctggggggaggctaaagttcaagctccccttcctagcatttctcctccttcaatcctgccccctagagattcatgccattggctacagatctgtaaggtacacaaatgcttaactagtaaaggtagtgctggctccaccactgagtagagaagcatggtccttggatttcttgctgtactgaagccctgggagcacaactgtggagaccaaactactcatatcctctgtctataccagagtcactgggaccagaggygaacggcacctggctgcagactcaaaatgaragtgacagccagtgctgcagcatctaggagcttgttcacacatttggctttgtgggccatgagcatctgatccctggccattctkcctaggtcatgmtcagaccttggccgtggccccattccatgttcatctttgtctggctgtactaggttcatgcctcatctctgctgtatccttagccgtaacctcagatcccttccagggcaaaagcctgatgcaagccccagtcactgtagcaagcctgccctttttccttccaactctacccagccacattgcttccacaacctttatgctcccacaccaccaggggtggggaacaggtgtgcaaatgcccaggaatgctgatgagcaacccactggttcaaggtttctgccatcctagttgccccctgtgcccagctacctccagaaaacctgggacatagagatttcatgcagtttctatttattttgcaactttttcaggaatctgcaagaataagatcaacaacgggaaattttagattagccggctgagccgaggttaaggtgcctgaattgccttactctgtgcctcaattgtatatctaggctgactcrgtgttttagattctcatgttaagcttgccatagtgcctcataaatcagcactgggcagatgtataaggatctattgattgttgcatctaggctgtaagatttttttttttaatttttatttcaaaatattgattcacagttgcaaaaatagtacagagagacactgtacacctttcacttaatatccccctctaccatggttacattttatatagctatagcacaatttcagaaccaggacactgacactggtacatgtgtatgcgtagctctttgtcattttatcacatgtagatttgagtaaccaccaccacaatcgacatacacagttattttatcaccacaaagatatctctgtgctaccactttatagttatgcctasctccctgtcttcccccaccatccttaaatcctgggaatcatgaatctgtttttcatatctattattttttcatttacagactgttctatacatggaatcatagaktatgtgacttttggagatgggcatttttttttaactgagaatagtgccattgagatacattcaagttgttgcatgtatcagtggtctgttcctcttttcgctgagtagtattccatgatagaaatataccagtttgtttaacaatttgtgcattgagcaaaatttggttgtttccattttgtggtcattacaaataaagcagattgtttacatttattayaattatcaaaatgttagaatacaagtctgccattttatttttattttttgtttttttcctgttgtttatttctctggtttctttttcctgcctacctatgcaccattgaaagatttgttaaaatcctaccttatctatagtattttttagcatatttttctatataactttttgtataaattggagttgcttgaggtatcttagtccatttgcattgctgtaaaggaatacttaaggctaggtaatttataaagaaaagaagtttatttgagtcatggttcttacaagctgtacaggtgccggcacctccttctggtgagggctttggggtataggtgcttccactcatggtggaaggtgaaggggagcaggcatcacatagtgagaggaagagagagagaggagagggaggtgccaaggtctttttaacaatcaattttcaacaggatctaatacagtgagaactcactcattaccaaaaggatggcaccaggccattcatgagggacccacccccatgaccttccattaggccccacctccaacactggggatcaaatctcaacatgaggtttggaggrgacaaatgcccaaaccatatcagtatctcattatacctacataaatttatcacagactactggcattgagatgtactagtctgagtgaaatgtagaggcagtaagccttttaagtcttaaagtcttaaatatttagttgtctataatatataatctgtaattttcttaaatttttttctatatacattttaaaaaccacatcaaatatttcccaaagtcattttcacacacaggtgggctaaagctaagggaggtgaagtgaatttgagaagcaagtcggtggcttggccagctccggcgagcctggtttccagaacatctcacttgccactctgtcttctcctaactgggggcttctcctcttcagagtcgtttattctgttagctgagtagtcttcaagattttgccacagctactctaggaagatgtcaagcgtattctggggatggagacacaagaaggtgaggcaattgctccaggccacagaggcaaacacagcaagggcagaggtcacaccagctcaccaaggtcatgcctgaccttcaggatggtcaggttagtgtgaatgggggttttgttgtatttgaggaaagagaacacccaaggctttcctatgaagtatttttatgcttaatacaatttccaaggagtaaaggtgactgaggtattttagagcatgaaggaacaccaacatcaaaccttttccttggcagaaaaagaaatagaatgcggaagatgcctcctaactggtctctatctccagtctgcttcgtcctgctgccagcatttcctggctaaagaggtgtctgacttgaatgcattgaggcaaatccagcccactgcctgtgtatgtctcaatcctggtaaagttaaatgcacttgaaactccttcctgagatgtgtgataagaggcaaagcatgataaagccccagagcaaggctggagtgagtgtcaggccagccaagcagttggcagcaagtaagggtgttgaggaccaagcatggcaagaagtgtgctgcagcsgggaagggaggacgtggaccagcaaaccctgggcaccaggtgggctctgtaacctcgatgtttctcttaacttctctcctttgctgaaccttttgaatacctaaggagggaaaattaattctaaagaaaaagtgtctgaagggggagaaattgaaatggaaagtcrtcatgtagctatccggcactgtctgtctcaatcatatgtctctgcgtggactctataccttttgggtcagagaagaagtgactgaaatagcagattggctcccttatggatatgtccaagacctggcaggctagcggtggctcctatacctacagcatggtgtctcatcacacatgtctcagacacggtcactcccctcagcttcagaaggggttctcatgagtcatttcagacagtaggtgaagagaaaaatgtgaaggacagtgcttagtgctggcaaggatgccgggaaatgggttctctactacgttactggtaggcgtaygtgtgtaaaccttttatgagctacttgatggcatgtatcaacattattgttaaaagacaccctttaacacaatatttccaataatgaggctatgccaaggaaataattaaaaatattttaaaatgttttagttatataggctctcatcacaagactattcccattagtgaaaactgaaaataacttaaaggtacaacagtaacttatagttatgtatatccacaagaataactatcttgcagatgttttaaagtgtgtttattaataccaggtaacagcatgggtttcaaagcaggacagaaatgacaggaatgctataattttaactatgtataaaaatatatacagaaaaataactagtaaggaactctgccagcattgcagctgacatactgtagaatgatgaatgctttaagctactatatttagtagtatgttgtggttctgttacttctacaatgaaaaacacttaataaagggaaaaactaaaatgaaaattttgaatctagatctcccaaggttttagaaatatgatagggttgtcatagctaagcattacaagaggaagtaagcagcaaggggtgaagaaatgaaatgygctgtgtgctgtggttgacaatgtgaggagaaaataagttaataccacttcactgatggatgcctcttggtgcttctcatcatccactcagcaaacttgccaacaacataggaaagtyctgggggaaaaaagcctccctcaaggtatcattcttgatcttttcttttacccacaygaaggtgtgagagtgtggtacacagkgaggccagagaaggttctcagctattgtgaggattgacttggttgctgtcattttctaccaaaagatctagcgtaactggcaccactgttcaaagtagtatttcagctttgcaatgaactaagttatggttctggaagaaaactggcttctgctgagtacgttctccatgtgctgcctgttttagaggcacagaacacttggagttcagtrtggcattattcccacttcacgagtgagggaacctaagctatgttaggtgcccaaggggatgccaagtcagaagcagagctgccatggacstagacctgtccaacctcagaatctttggcttttctctttgccaggccagccctgcacatccacgactgggatctcctgaatgcctcagacagtggtgctctgccccatctcatttcagttgctctctcctccagcttgcaccaggcaagccaagctttccccaaagggacacggcccctgcacctagcatggtgctgagtaaggtgttgatttattgaatgcaccaayccatacttgccaccattatttcgtttctcctatgaggatctggaaaaacactgaatgtaataggatgggagtgcaacttcattcattcacagccagtcagaggtctgcaggtttagccaagaaagctcatagagcaagttatgcaagctcagttcagagagaaaacattgctttgggcctaagaagctatctgcctattgatgccttaataataaaacctgcccatttctgtggtccagctctgtcccctacccaacaccaagtgctcatctactttcttacaaactcatgctctgagattccttgcctttgaagcccagacccaaaacatttccattaaataacttcacatttgggatctggcagtgggctctgaaatgccagtgatagtgagtgtgtggcggcattagctgcttaggccacagtggtagacaagagaratctgggggcaasagtaggatggacatggacaggcccttsctgactcactgtgcctgtacttgtgagwgtgtgtgcagaggacagagaaatgtgtggaatggcaaggaatcaaaagcccttcaatcaacacaatcacacgccgagaaagtaaggaaaggagttttatgggcttgrctgaaagagctgctgcagccacaggggagcccttggtttcctgtggaggtagcccactgccctcttccctccctctctctttcccttctgcctcagggtcagsttccaagtcacctccagtcttcccaggartccttggccatggaattgggtgagatcagattgggaaagatggtctttctcggtgtcgtcrtggccatgttcttgattctattcaggttgtcccgggcgttttggcattttctcaggcaagccgcacacagatccttctcctccacaacatacaagttctccagcctcctgatggagtctatgaatatttccgactcacctggctttggaaaggggttccgctttatgttgagctttttcagcttggggagcttggagatgctcacrgggatgttgttcagtaggttgtcatggagccctacctcrtggagctccttcagggcccccagyrtggtgggcacgctgtccaggtggttcaagcctaggttcacagcgcggatgttcttgagttgcttcagctccacgggcagcccgttgctggtcagccggttgttgctgacgttgaggtagagcaggctggtcatctggccaatggactcaggcagcttgtctatgtagttgctgtgcagrtccagccaccggaggttctggaacttggagatggagtcagggatcttcctgataagattccggctaaggtccagctcgtccatgtcactaaggcgcagaatacacttggggaaggtggtaattcccatcttgctcaagtcaaggygctttttcccatcaaaagtgattttgatgcaattcctggccaccttgagggtgatcttcttgcccttggggmctttctcacccttaaccatgttcttttagtaagggagtgttagaartttattgttctgattggatagtgatcagtgtgaggaaaaatcatgaaaaactgctgaaagataagaaaacatctggttaggagatgccagagggcactgggctcccccacgtcatgacgctttgctcttcagtggtttaaaaagcaagaaagaggattgcggagagaagtcagggcaaagtggacccagcccagccatagattgtcagcaaactgtgtgmcttcttcagactttgattttcttggatgttaaaataggaggtgcagggtcagcctgaaggacactaaatgtccctctagctgtgccatgccccgacttataaatactctccactgtcccagactgtcacgtacccccaacccagagccmtgtgtgtgtgttcttggatatctgccccttcctagacccctgcattaagctaggatttcctgaagttttcatacaagttcctggggagggactgctgagttttccagccaacataagcctggatcttagagaataaggtgggtactaagaccaacttctcacatccctcttcccctcatggacccagaggaactagtgaggccttggctacagtscaacagtagccatgcrgaaaagcctgttgctcagcccagggatatcagggtgtgccattgctgggcccagcagcaccataactccccatcatgagcacacagggggatggggggtgcgggcaaagctcatggagaatgctgccttttccatctcctgcccattctctcatccttcacactggacttcaactcctctgcacagaaacttgataaatggccgtgactgcctcagtgcagggaagcagaatgtcaatgtgatgtgatggggattctggcttctgcatgcttggcttagaagtccagctctactctactcacaatcttcttaaattcccagtgcttgtgttttcttatttgtgaaaacagacacccttrcagagctatgagggggcgtaaattatctaatactataaagcacttataacagtgcctggtacatagtaatagcttgattaatgttagttattaaaaattgctacacatattgtttctaatcctcaataacaaggtccacagcattaccctatcatagcgagactgaggctcagaagtgaggaaggtctgcagccaggaagaggacgcaactctgttctgtttggttctgggacccccttttctttttaaaggcctcctgtgcctcctgcttgctgattttttttttttggaccaagatttccaaaccaggcagaagtatgcccttgggagacacaaacttgcattgcctctgttccctgcagggatgggcagggagaggtgctctacagtttctgtacttcatcacctgtaccttttattagaacccaagttgatatagcacatgaatattgagcaatcaggctgtgtgggaatatagttgtatgttttcctcacccagtgtcaaagggaaatgtgtacaagcctgtctcacacctactgaaaatcccactgtcaccactcatagctgaagggtcagagggtcctaccctgcgaaaggcctgatggatcacagccgcctgggatagatggtggtctccacagtaaaccaatgacagttcttagctcttggcagcattgatgttcatttacacaggccttgtaagctgaccctagtctttaaaaatagtggactccccattttcgggcataattggctggtttccagagccagcaccatgttcaccaatactgaactgtctatatcattcagctctgagaaaccagataggataaaacagcttaaaaaacaaagtggagtccaagtccagttaagattttgtatgctcacttggtmccaccaaactcctgaaagcaagtaaagccttgggcagaatgcacagagaagcactctggggactctgagataagtgatatcaggcagattggagaagaaatccataactcaaagtaaagaccaatctggccacaagtttcctgaactcctttttctcccctcaaccgtttctcttggcttggactcaagggcagcccagaacacaaaactttgcaccagatgaggacagaaagatttctgatttccaacaagagcctctctttctggtccaaggaacaggaaatggatttttaagggtcagagacagtaagggaaatctgtttggtgttctgttttttgtttgtttgtttgtttgcttgcttgcttctctcctgtctcatcccaggccaccctgtatccctggagtcatccaggcaggcatctagaagctggaagaagagaaccattgtctttgaccaaactgtggtcctcagagctggggggttgctttgttttctctaccctactgccacttggctctagaggcagaaacagttgcaagaagtgtgcaacagatttagaaaacaaaatccagccagaagaccaaaaagtcgggggagaagagatgctcctgggagccacagagttcagagagattgcaacarggaagaaattcaggaaaagtgattctgaaagttgtatagcaactctgaactckcctgagctgcctctgtttaaaggcagaggtgatttcttcattgtgtgatcaaagagtatacttacacaaacctaaatggaataacctactacagacccctaggtgctttttaaaagtaaaaagtcctgctttaaaaatatgtgtgtgtgtgtgtgtgtgtgtgtgtgtgtgtgtgtgtacaaccatgtgctgcataatgatgttttggtcaatgacagattgcatatatgacagttgtcccataagattgtgatactataattttactttacctcttccaggtttagatacacaaatacttacccttgtgttacaattgcctatagtgtttagtacagtaacatgctgtacaggtttgtagcctggaagcaatagactagatcatgtagtctacctaggtctatagtaggctataccatctaggtttgtgtaagtgcactctttgatgttcacataatgatgaaattgcctaaggatgtatttctcagaaagtattcacatcatgaagtgacatgtgcctctatctctatctctgctgatacctatacttacacctgtatctcagaaagtgtggaaaaacagttgtggtgcagaaaaacatttgaaggaaaaatggctgaaaacttccaacagtgatgaaaaagataaaaattacaaacacaggaaggaagctcagcgaactccaaacaagataaataaagaaattcacactcagacacataatcaaactgctccaaattaaagaaaaaacatgaaagctgccggagaacaatgacgtatcacccacaggggaacagcaataggaatgactgcaggtttctcatcagaaaccacaggggccagaggtgctggaaacatcatttttaaagtgctgaaagaaaagaactatcaacccagactgtgacagtatcctttataaatgaaggcaaaataaagacattatcagatgagtgaaaaataagtttttgccactaactaagctgctgtaaaagaaatgtccaaggaagttcttcaggtgaaagggaaactatactagagaggaactccaaactttggggataaaggaagtgcaatggaaatgctaaatatctgagtaaatgtggagtatttttctcttctaaatacccttaaaatatgtatgtgatcgaaagaaaactaacactgtgygatggagttgtcaaagtatgtagatgtyatacataagacaactactacataacggggaagtkagcaagacctatatggtggtaagggttttacactgcttttgaagtggtgaaaggttaattttaagcagacagtaaagtatgtgtattttaatcctcagagcaatcactaaggcaatatataaaaagatatagtaaatartaaaaaactaaatatataaatgagaataaaacagtttaaaaattcaaataatacaaagaaggcaggaaaagggaacagaargagcaaacagacaacaactattaaaatgatagactgaaactcaaacatagcaatacttacattaagtgaaagtgacctacatgctccaattaaaagacacaattatcaggatagattacaaaagaaaaagacccaattgtatgttgtctataaagaaagtatactttaaataagcaacagtgagttgaactaaaagaatgtaaaaagacataccatgcaaacactaaaggaaggatgtagtgactttattaatgtcagataaagcatatttcagaacaagaaaatttacakgaagtaagaccattacttattaataaaatgatcatttaaccaataggacaaaaaaatcctaaatgtgtatgtacctaacagcagagcttcaatttaaatgaagcaaaaacataaaattgaaaggaaaaatggataaatttaccattagaattggagacatcaatacttgtctctcagcagtcaatagaacaggtagagagaaaatcagcaaggaaaagggtttctcaaccttggctctgttgacattttagaccaggtaattatttgttgtcagcagggggtaggatggtgacagggcttgggggaagacctgccttgtacattgtagaatgtttagcagagtaaggccagaagattctacccactggttgccaatagctgyccactagttgtaacaatcaataatgtctcttgacattgccaaatgtccactgaggagcaaaattgcctggagatgagaactgctagtatagaataactcactattaycactgaccaactgaatctgacatgtataaagcactctacctagcaaytgcagaatacaaactcttttcaagtacatatggaatatccactaacacagactatattttgggtcatgaaacaagccttaacraatttaaaggrgttgaaattgtacaaaaaagtacaagctggttctttgaaaagattaatgaaacagatagccagactgacaatttaaaaaaaaaagaaagagaagccaaattacacatatcaggagttaaagggaggatttactaaatcccacaggcattaaagggataataagagaacagtacaaacaactctaaaaaaaagaggaacttagataagatcaactaaaaactactaaatatttgcgaaggaatgaaaacccaaatagacctgtatttattgaagaaatggaattcacggttgaaaccctttcaaaaaagaaaacccaaagcccagtagtcttattgttaaattctatcaaacatttaaagaagactgtcttggtccactcaggctactataacaaagtaccatagactagttggcttgtaagcaacataaatttatctctcactgttccagaggctgggaagtccaaatcaagtcactggcagatttgccatctggtaagagcatgctacctggttcatagatgttttcttgccgtgtcctcacatggtagaaagagagcaaaacaattgtctggagccccttttggtaatggcataaattccatttatgaagtctccaccctcaagawctaatttcctcatgatctaaatgcctcactttctgatacactcacactggagatcagagtttcaatacagatttttgggggacacaaacattcaatcaattgcaaagacatactagcaatttgatatgatctctttcaaaaaaaaatagaatagagagtgattctcaacktattttctgatgtcagcattaccctgatgctaaaatcacacaaagacatataagaaagagatcttcagaccaatattcttcatgaacatagttacaaaaatcctcaacatagtattagcaaattgaatccagtaacaagtaaaaagaatataaatgacagcccaaacttactcaatacttgggaatmagttaatgtaacataccatattaacagactaaaaagaaaaaaaaaagatcttataattgatgcagaaaagacatttgacaatgtaacatctgctagtgattaaaaactctcagcaaactggtaatagaaaggcccttccttatctggctaaaggacgtccacaaaaaagctagagcggacaaaaaaccaaataccacatgttctcactcataggtgggaattgaacaatgagaacacatggacacaggaagggragcatcacacaccggggcctgttgtggggtggggggaagggggagggatagcattaggagatatacctaatgttaaatgacgaattaatgggtgcagcacaccaacatggcacatgtatacatatgtaactaacctgcacgttgtgcacatataccctaaaacttaaagtataatttaaaacaattgaaaaaaaagaaaaaaaaagctagagctagtatcatacttcgtgaaggacagaaggttcttctctgaagtttgggamtaagacaagagagcacactttcactatgtctgttcagtattactttggaaattctaaccagtgcaataatgcaaaaaataaaggcatacagacagaaaagaatgaaataaaactgttcttatgcacagatgtcatgactgtccacatagagaatcccacagaattttaaaaagattcttggaactaataagtgagtttagcaaggccataggatacaaggttagcacacaaaacacccattgcatttccatattactagctattaacaattggaaactgaattatgaaaaataataatgctccaaataataaaatacttctatatttcacataaataaccaaaatatgcaggatttttataatgaaaattataaaatgctgatgtaagaaagcaaagaagatctaaataaatggagaaacataccatgttcgtgaattggatgacttaatgtcaactctccccaaattggtctaatcaaaattacaggaggattatttacatatatggatgaatagattttaaaacttatatgaaaggaaaagaaactaggaatggaaaataattttgaaaaagaataatagagttggaggattatgtgtcccaattttaaaatttaccatatagttacagcatgtggtattattggtgatgggacaggtagataggtcaatggaacagaaaatagagtccagaaatagatctacacaaacatggccaaatggtcaattgatttttgaaaaaaggtcaaaggatgttcaatggagagaaaatgaactctttaacaaacgatgttgaaattggttatttatatgcaaaaattaaaccttggcctaattaacacacattgactcaaaatggatcatagatttgaatgtaaaatgtaagactataaaactttgaaaagaaaatgaaggagaaaatcttcatgactttgaatcaggcaaaagcacaatttacaaaagatagtattaataagttgaacacaattaaaagctctgtggaaaaaaaaacgttgagcatgaaaagacaagctacagactggaagaaaatagtgcaaatcatatatatcatagatatctggtatccaaaatctataaagatcttttcaactcaacagtaagaaagcaaacaatacaattttttttaatgtccagaatatttaaagatacatttcaagatagaaatgtacagacacaaaaatcgatagtgcaaagttttggcaaggagatgctgcaactagagttctcattccttgctgatgggaatgcaaaatggtatagtctcttggaagacacttcggaaatttcttataaaattaaccatatagttattatatcatctggcattttcccaactaagtatttaccctagaaaagtaaaattccatgttcatactgaaacctgttcacaggtatttatagctgctctattcataattgccccaaacaaaaaaataataaatgtccttcaatgggtggattcctaatactgtacagtagtcccccttatctgctatttccatttccacatttttagttccccagattggaaatattaaatggaaaaccccagaaataagaaattcatacattttgaattgctcactgttctgagtagtatgaggaaatctcaggccatcctgctacatcccacccagaccttgaatcatccctttttccagtggattcactctgtaaatgctagctgcctgttcgtcacttagtagctgtcctagtagtgagtagtgatgctggtagttcagatatgccaaagagagagatgccttaaagtgcttcctttaagtgaaaaggtgaaagttcttgacttggggaaaaaaacaaatcatatgctgaggttgctaacatctacagcaagaatgaatcttctatctgtgaagttgagaacagtaaattgttgaaattgttctattttatgatraattgttgttcatctcttacggtgcctaactcrtaaattaaactttatcataggcatgttttcctataggaaaaacatagtgtactatagtggtttcaggtattcaatggggrtcttagaacatatcacctgtgggtaagcgaggactgtggtaatggaatactactaaacacaaagtctacggatacatgygacaacttggatgaaccctaaagcattttgcctaataaaaaaatgtctcaaacgtctacatgaatggaatgattccatttatgtcaccttctgaaaaagccataactttaggtgcagaacaaatctatggttgcagggattaggggttggggaaaggcttgactagaagggagagtcacaagtgagttttctgggttggtgtcactgcctgcaccctgacagtgatggtggttacatgaatctgtacatctgttgaagcttagagaactgtgcccaaaaaggcaattttactgcagaaacatttttaaaaaatcgtttttaaaaaaactttacaaaatagttgggactccatattctacttctgttcctctcactgtgtctgctggcttgtcccacgttggaagtctgtgattttgttaagcccccacacaaccagttctgcccctgaaagggcatccaaataggtagcatctgggcaccactgtggtccaatgtgtatgtctccctggtgtatgcactggggggatgttgtgtaccacagggaacagrtgttcgcaagctggcatgtcagaaaaactgtctactgtgcttgagttgaaatcttcattaaaaagasatgaattgagatcaaggaagtctatgcactcatctgatgtttatcaatggcttctccccatggtagatttgccagatttagcaaataaaattgcaaaatccccagtaaaatttgagcttcaggtaaacaacaaatagtttttagtatatatatatatatatgtcccaaataccgcatagtcctgtattttatttggcaaccctatcccatgggcctaaacaatcagtaaattttcatttatctatggtcattattagtgcttactcatgcattcgttcatttgttcattcactgtatgagcatattgagtgcctaccatttatcaaccctctgagcaacacagataaacagtaawcaggcccagtcctcaagttgaaatagttcaaatctagattctcactgattctggccaccagattcccctgaacaccaaaaacctgggctgccttttggttttcttctactatctaagataaaattcagctcagggaggccaaacacactgagcatggcttagagagaatcctggacaggaaggggtgcttccagcaaatgggacatccagccagttgggcccagctgtgcckgttgcccacagcccacccacactgtgagaagaagccctcccagctctgatgaatggtgatgaggaagcagcacggagctggctacagagaactcctccgttaaggagcctctctccaaagggccctttggctccaagcctgcccattaatcacctcaaggtaaagtgagggctggctaggataatgtacttyacctccccagggagtctgggtccctaggcagccccggggccagatggggcacagtgaacttccaccctytctgcgcttctccctggggtcacccgaccttggcagggacccttcctctcagttatagaaggcagagtgtgttgtgtggctcagggtccatcctgaccccctaagctgcccagtaccactagaagcagacccagtgccagaagccatgatcttttgatcatctgtttgaaactggctagatggcctattatcagttcatagaattcttgaaatgtaagagtgggatcaacccacacaagggaagctgatagttatagggagaaagatgtaagtagataagcagatagatgggcgaatagacagacgaatggatgtatttatgtatggttggatggataatagatttcatttcacatgaacagcttagcagctcaaatataagaggtttctaaakgtactgtgtctttttgttcttgtacaattkttttttatactttggaaaaagtggcccagttggtttgactttaatttctaattaattttttctctttagtcattgtgaatcaaacagcatggtgggataccccatggatatctaaattaaaaaagtaatggcaaccaatatattaatgtcatccaaatatttgcaagcatttccagttgtaagacccttgtcaatatgatactagaatttgtctggtgcttcacactcatgtatctttgactacaattttaagcagactgactttgtttctatatttctgacatccctaaatagcttgctaacacaatcttacaataataatttcattctttcaactgatccattgagatacaggatagacacatggaactgaaacccccatagacactgccatttcacagccagtatttgggactagctttgtaggcagtttcatgtcatgtggatgagaaatatcttttacttgtcggtcatctcttaaaaggwaatgatgcaaacttccctcaacaactcactcattcaaaggtaactgcatttgttctctctcccgaccctcatatttactgggtgtgtaacaggccagctcacctaactgtgacctcccgagtggcttcagatcactctgtgtcctctgccccttcccagaatggtcatgctccctctaaagagaggcggggctgtatcttcacagatgaagtccatgggaggtggagacctgcactgtcatagtgggtcctgtgtatgtaatgggtgtgttgggaacctctgggcaggccgctgaaatcagcactaacttttgactcaggcatagcttggagaattaccccttgtccaaagatcattctgggcccgaaattgtgtgctgtgctacttgctctgcagtgttacctagatttaggaatatagattccttgggggtataaacataaagtgttttcattttctccactaactgccccaatgtgagcactgcttccctgtgggcagaaggacagattgctagaaagggacagattagaggtgcagagatgatggtgcagctcacagcagtagctccaccacactctgagcagagctgatggagggatgatggcaggagagatgcagaagcaggggttggaatcttacagggactccacagtttggggggatttctgacatcaattttggaaatactgccaatgtcaagagctcctctctatcattcactcatggtaccaaagtaattgcctcaaacatgctgctgggcccttcatgtatgtctaatctccagagaaactaagcaaaatatcttatagtaaaatatttttactataagagaattgagactcagagaagttaagtgacttccccaaagtcacacaggcagcaaagaatacagccaaagtcaaacctcaatgtgtctgatacgcaagctggtgtacaatctttctatacactgtgccacctctctctctcctccctctgttgcctgtgctcccccagtggcaaatgcctcatcctggggatayattgctggcccccactgcctcccgggagaggaagccatcctggaatcctatgactctcaggctgaaagacacacccacttctgcayaggagtttaaggaaggccactagcccctccatggccccaggccccaggaagggtgttcctgttttgctggaatctctgacattggaaccaaggattgtcagagtccccagaactctgggtgatgagacacttgctccagcccattttaatttggcatggattggcctgggaactgcaatgtcaccccctagagagtctgctaaatgaaggatggtgtgcactctggctgaagcagccagccaacgcaacagattgaggagacagagaggcagccttagccaaagtccctgcagaggttcagtaatgcagatgttccactgaccttttggaggaactgaccacaggcaaataaggtccctgaagaaatcatttcagtgtgacccattgtctgctcactccactgtccaggggccaatatgtaggatgttcattttcatagatgtaccatatatatgtgggtatatttctaaatatatacaaatagtatgaatgttaatgatattttaatagcattaatggagtcatttaactgtaagagcttggtaattgacaatgaaagagagaaagagaaacagtttatggggcacacataatgccacgagccagttcacttcataggcatgtgtccccaagtaggtggcaatggaggcaggaactcgttgtttctcagcttctccagtccctgcaggcccaacgcagtgtgaacgccttgccacatggagtgtgagtcaagagtgtgaagacacaggattttcatgtagcattgcccagggacattggccaactgcattctctggttctcaccagagaggcagtgacctctttgccctggagagctgcaggctgctgtagtgcccctgtatcaggggcggctgtatgcagactgcctgargtttgatttttaccgtgtgagctcacttgaaagtctaacctctcgttaagtacttctgctgttgccaaacagcagcygtctctatgtgctggtcaaatgatgcctcccccgaaccctcccccctgcttccacacacatcctcagacccatgctaagaggtacatcatgcccgtgtcttcataaagtgacctctcctttgccatttcagtcatccgcaacactctcctttgtggtaggaatatccctcctattgtgggtggtggggggaggggaatatgtgtgagaagtttgtccaggctcacacagctgccttattccagcacttctgtgggatgcgttcttcccattacgtcaaaacttccacccacatgcctgtaaagtagcaaatggagtgtctgtataaaaattctcaggttcacttcatttggcaattatctggttaatttgatcaaccaagctctaagtgtcttactgggatattatgcatttatagctttgtctgcccctagtattatttacttctctatccttcgcaccagcgtggctctgcacatgtgctgcctggaaagccgttagctgtcaaactgccctctttcccctagcggataataagaattcaacttttatttggagcaaaagttcccaagaggtcacacggcccaataacaaaagattatgctttcttattggtttaatagcatctattttgtaattctggatgtactctgttttaattggatttgttaaaggaacaaaagggaatargcaccttacaattaaaataaaatattaagatgattagtttaacagactagaaatgccttgttcatccaccstatgttcaaaacacacaaaccaacctcaagagaagcaaaagtcaaagaaccaaaggcagacctggcccctttgaagcycatgaggtgagcagtgattccattycacccaatgtgttttaagcgctgctattgccagacaggtgttattttgtcttctcctcacagctcctctcctcccrcagattaggaaactgggtctcagagaagcggcttggcagggaaatgtgccagggctttggctgtagtgggtgtgcccagccccctgtttaccttccccatgaccctggatggtctcctgaaccccacaagcttcagcctgaactcctgtaaagaggatgtaaaagtggctgcttcccaaggtcaggggagggcaatgcgtggcccttggaggctttggttttgacgtgtgtgtgtgtgtgtgtgtgtgtgtgtgtgtgtgtgtgtgtgtgtgttggtgggggttggcacaggaggcagcagcatggatgggaccacacaactgaccaaatggggarcctggactccaggtgccagcccagtagaaaccctattcagaccctgcagcctagcgtccttatggaccgtgacccctgcctccctgagtgcaggctttcagttaatttatcctgggggccaagaggacacattgctcctttgagctgcacaggccccctcgtatcatgctggggcatctcctcacatggaattctttctgcacttcacaccctctagttctggtgagggcccactggcgacagcccagagtccactggagcaccccatctgccgcaggacagctcgcagccctgtggcagctttgctgaccgcctatcacctgggaaggtgtgaaatgactgcaaaggggaatgctgagggtcagctctaaggacacagctgaacttcccacagccctttgaagtcattcactcatcaacagtatttgttgaaaacctactatgaatgaggcactgttccaggcagcaaasaaaatgaaggtcccgctcacattctagaaaaatcaagcaaaaataaggtgtaatgacaggtgtgatggatgttaggaagagaaagagtcaggatagagacatagagattagaagagaagagttggaagatgcrcttttttagaaagggggaggccaggagggccatctttgagaagatgatacctgagcagagatcagagraagtgaggattcagggagagaatttcagatggaggaaacatcaagtggaaaagtctctttgcagagaggaggggatggacaacaagaggaaggagagaaggaggacagaggaagaaagaaggaaggaggaaaggaagggagggtgggaggaggcacaataaaagataataaagaggagaaacccagccctgaggctggtaccaggcatggggttgcactgggctggtctcaatagcctctaggctccagcaggaagctattgtgtcctggactccatactccaggccagtgagtgtgggcatcagggggcagtggaaatagcccrgcatgggaggragttgattgggtgggttagaggctgcctctgccacgtgccccctgaggtccatggccaagccccttgctcctcttctctgcctatacttattgtgctggtctacactcactctcctggtaagcccacctagtctcattgctttgaatacagtctatacactaaygattgcccggtgtttggttcttgcccggaccttgctccccaattctggactcacttagcctactgcctacttagcatttcttcttggatgatgataagcatctcaaaccctgtctgtcccaagcccagctcccagccagctgctccaccacagcctcttccggctgggctgacagccttggcctcctgtggatactcagggcccaaactgtggcatcagacttgacaactcttcttccatccacccccaattaataaagcagactgaccttcccccacacactgatgccccttatttctctgcacttctcctccaatagcatctggcatctaaatgtagtttatgatgcattacttgttatgcttgcatttattatctatcccccattctcctcccccacctaccccaagacacatggcctgtctggttcacttgtccatttcasttcctagcacagagtaggcccttggtcmatactagtttaatagatacagtctaagcgcttacaaggtcaatcctgattcccatgccctcagaaagggtctcagctctcagctttgtcccagatttcatagctgagagtcagctgctacataatcaacttgactcactgtttttacatgtactgttgaaggatttccagaatatgaataygttttaagggagaggtccctcaggaaaactcaggttgtcacttgcatactaaatatttgttggtcactgagtgtgtaccctcttggagacaggaatgctttccaaatagacacagatgatggcacgacggattgtttgaccatgagaacaagtgcactatggggctggagagtgatcagtagcatcgcacttgaggccaccttaactgggttaggccaaggggagaaggatgggagccaaggcaaagagacgagatgaagcaaggaaacggctggtactctgggaagaggtgggactaggctatggagaacacatggaggccacttctaagaatctcccttcaggaaataagaacaagacttttgatagaaacatgcttatggtggtgccatttaaaatagtaaaaaaaaattagaaacaaccyaaatatctaacaatagaygagtgattaaataattaatrtgtaatcatagaatgaaataaataataaacagaaactaaaacaaaaaaaaattatttcccaaaaatgtcaaaaggcaaaatgctgaagatgtcatgttagtgaaagaaacatttgtccgtgtgagccctgtgttctctggcrcacatgcacccccatacccagaaaagaggagagaaagaacgccaagaatatcagcaacactgctctctgaagggacggtactggactctttttactttccttcttatatgtctacatagtttttaaattccctgcaacagatataaaatctatttctaaccagaaaaaaaaggtacaaacacacatgcatgcacactcacactcaaacacacacacacacacacacacacgattccgcttcttttcctcttagaggacagggtggtggtrggagttattcactggagctagatttgcctttggcagttgcagatagaggatacctgagaggtgtccccaccactgcagacacaggaattgggcagcaggtggagagtctggttgcctgaggcagccagtgctgtcctaggtcatctgtgagctctttatgctgtcccagagtggaatgcaagaggtggccactgagagtgggggaggagcaggcagcccaaggcagccrttcctgtttccctccagaggtactctatcagagccagcccacyctcagccagccacagagggccgtgctataaacaacacgtggcctgtygtgagmgggtggcccgtattatggtgcaatatggggaggatatgtcaagcaaaagctgaactttctccctgcaacctccatccagaggtgaagaactgtggggaaactgtggcctactttttgaaggaatgcttcaggttagtggagaaaaagggtagtttgggctcattgcttgcatggaaggcccttgtctttcagaaaatgctgcaatgtctaatcctaaatttcttctgtagaaacttttcctaaattcagatttccttttcctcctggaatcttcatgaggtttatctgaaatcatgactgaagcactagacacttcccccaataagagagatagctttccttaggactttgtgcaaacagacataactattgccaggagaattgagaatgatgtggtcaggacagggcagcaccctggcagcttctagataggatggccacccacatgttagtcatgccggctgtccctttcctgctgtgcctgaaaaggccggtgggtaggctgcagggagcatgggagctgtgaggcaaatagaagtgagccccactccccttcattgccaacccaggtttagtctcataacacgcctgagcccagtttattgctctgcaaaatggattggtcaattgctggttgtttgaagagtgaatgaggtgataaaaatgttaggtgaccagtgttcagtgggcactcaacaaagccagtcatctggcttctaccaccagtggcgggtgctggtggggaatgctggtggagtcaccagactgcaccgtctccatcacctccctcaaaccagctgctctgggccactccccactggtcaggaatctcagatggaggagttggagaacaatctttgctgattcccaaatacaaagtctttgcaacctttcaagcactgacaaattattaatactaacattactagtgattgcagaaaaagagatgtaataatagctacttacagatataattatccctatactcacttttaatctctagagctggctacagttcagtctcctcattcagtcatctgtccaacarttcctactggagttgtactatgggtcaggtcagtggatatgcagtgagcaaggctatacctttgtgtttctcgtgaagctaccatgtcaagagagagcaaataaaaaaaaaaaagagggagagagagagaaaaaaaaaaccaaggagcatttcagttggtgtaaatgctctgcaaataataatagctgatgatgtgacagagaatgccaaagtcagaaagggcatatcggtggggacgttgctaactcagactgaggtgggtggggaggtcctttctgagaaagygacatctgagctgtaactagaatgctaagaagaagccacatggaaggattttggaaagaactgacaggaagagggtgtaagctggaggtcaaggaggggagggcgaagagctgagcaagggcagtgcaagstgggccatgtgctcatgggtaggggacaacataaggccttctataaggataacgctggccgtggggaggcagcagaggcagggaaggagagtgatggagacaggccagctgcaggcaggagaagaggggagtctgtgctgargggcatggcagaggagggaccatgtggatccaggctctgtggtggaagcagagcagatggaacattcttctagattgtatatgtggaccaggcaacgagaaaacccaagggcaggctggaactgctagaggggcctagcacttcccatatcttttccttccttttgcccagcacaaagtctaagtrcctcatgtgcatcatctcatttaatctagtcactccacttcacagatgaaacacccagggcctagtcaaaggcgcatgcctcgactggagccagcatctctctggtgccctttcccaaggacttagctgccatctggcttttccatacaagcttggctttacaatgtcagatggctctcttggccgccagtggctctcttggccacccaggaagctcctgactcatcatgttctgcagatgctggcaggagctgagctagatcctgtgggaaactttcttcctagtccaggtcaagccccatccttatagctcatccctccctgaaaaagaagcatgcatgtgttattagacccagttctaggggctgagatgagttccattatatgatactagtagggagctcagaaactgaaaaattggcagtgaattgcattggcaatgggctgagagttggcgatggggctggcaacagagtagacatgggcgtggttcaattgcacaccttgtgttctagggtttcaggggcctggaaacatcatctagctttcactctctcatctctccgctgataggaagggagaaagggcctgacatcacccttgatrctgggtaacagtgagagaccattggaggcccaagcagaagctggaggcaccaagcaccaggcactaacaaaccggtctgcagacaaccacagggctcaggggccctgcagggtggacagcagctgtctcagtgcctcccatctctccctggaggctgaggctcaaacccagaaggcatgtgatcagagcagcttacaggcctgtcacagccctgtcctcctagacgtgtgactttgcataagtttcttaacctttctgagtccccatttcattggccgggagtgttgttccatacttggttcacatagcatccgtgttgttgataaatgtatggagaatttattatgtgcccgaccctttgcaaagcaaagacactacctactttttagcacattaaaatgaggttcctccctctgtatggattctgtggaccacccactataggccaagtattttacagacattacaattgagtcacaactgcctgacatgtcgattttcatctccacyggrgggatacagcaattgaggctcagggaggctgagaaacttgtgtggagtcacaaagactctaagtagagggcctgccttttcccattatacctgtcataaaagttgggtcttgaggagtgtgttcctgtgtgtcccatgaagaatccccctttgcaaagcccaacttagcctagggcttaaccacttattagtgggttctagtgttcaggataacttgtagaaaaagtttaccaccagacttcttaaaacatggattgctctcccaaccccattacagtaagcggtaatcaggtttgttctgctgggctggaccctcctgaacgaagaagcagtcacagcttagtttccttagaggggtgactggtcgggtgaaagcaagcagttcaaacacatctccgcctagcctgtagagcagcaaaaacactcacagagacccagactttggagagaggatcccgtgtgatccccaaagcaccactgacttgcacacctgccttcycaggctcgcctgtgccctggcccccgaggatgcccactgtgccctagctagctgcccttcctgactggggctcaggcaagcttcctcctctcctaaataatgcattagctgttgcctgggctttgtaaataaagcatactgggaaaacaggcatttccaaagctgcttactcaaaggaggggagaaagagaaaaagtagagatccaagcagttgtttggcacagttaaagtaaatcgataagcgcagggccgccgcccgagcaaaacttaccctgctagtcccagcttctcctcctcaactgtgaaactttgtcaccaggcaacaagagacttaggacctggaggtcattagcacagtcttgacaccagcctgcaaagtgagaggacggaaggctgaaagggtctctaagacactctaatttcccgrcagcctggcttgcctgccacgaggagggaaccccagggctcaccccctgtgattcctgcagttgggcttttcctgctgttcacccagcagtcagtgggagaggatcgaatcagagcccctgtctatggcaacggccaagcggatgtggctacacagggaagaagccacacatttctcttaaaagagacccacatttcactttaatagcattcaygaaacatcactcccctttcttcgaatttgtgcaagtattttttttctgctctttggtttttgagagggctgtctttcatctatttatttgaatttaattatttgttactcttttgtttctctttgcaccctttttccactgttaaatcagagtagctacaatactcataaaatcatacagccctgtaatcatattctcttacttgattgtatgtcattaaatgctgatgtgtagtttctgaaatctgcatcctgaatgaacacacagcagtaagccttgtgctttgcttttcctgctgtttccagcctggcattatcatgaataaggctgaaattatctatttgtgcatctatggtctttttttttttcagtttttttcttacattaaatttccagaaattgagaaaatgaggaaaacaaattaagtatgaaaattattatgcagatgataaagcattggaaaaaaatttgaaaatgtatatgcagaaataagaaattgaaatgctctaaatttttccacctagtcataaattagaaaataaattaactagcaaataagtgaaataagtaatttcaaatccaaaattaaatttaagtagtaaaaattttggaaagtacaaaaaaagcaaaataaaatgacttcaatttagaaataaaaacaaaacaaatcattaaatgagagctaactataacattttttaatacataaacattaccatatcatgttttaagtccaaaaaataaaatacataatttaatgtagacagcaaatggattaaataaatttctgaatgaagatgactagaaaattaaaaattacctcaaattctactacccagtatacttctaattagaatatatgtgaatacataatttaaaattgaaattaaataatataaaaatcataaagcacataaaaataaaatcaatatttgaaagaggaaaatatacaagataaatacattttaaaatataggtatgtaaaaccgtatgaaaattaaaagcactcaggccaggtgtggtggctcatgcctgtaattccagcactttcggaggccgaagagggtggatcacaaggtctggagatcgagaccatcccggctaacacagtgaaaccccgtctctactaaaaatacaaaaacattagttgggcattgtggcaagcacctgtagtgccagctacttgggaggctgaggcaggagaatcgcttgaacccaggagacagaggttgcagtgagccgagatcgcgccactgcactccagcctgggcaacagagtgagactccgtctcaaaaaaaaaaaaaagaaaaaaaaagaaaattaaaagtgctcataattttggcaactggcagtaactttgtattgtataaacttcaggtttttttttttgagacatagtctcactcttgtcacccaggctggagtgcagtggcacgacctcggctcactgcaaacttcacctcccgggttcgagtagctgggattacaggcacccaccaccacgcctggctaatttttgtatttttagtagagacgaggtttttccatgttggctaggctggtctcgaactcctgacctcaggtgatccgcccacctcggcctcccagagtgttgggattacacgtgtgagccactgtgccagccaactttcagatttttaacgtatgtacagcctcatattatggcatagttgtaccataacaatctggtcaatttactaatgctcattttttaccatcatgctgccaaatatatgccactgattagtttgtcaggtagctggcatttcatacatttggatgaagatttttgtttgtttgcatttgttttcttcagtgtyagggtcctggagcaagatctggtcctggcaggtgctctgaacagtcagcgtgtcggtgtttatgctggctgctctgtgccaggcctagggtagacaccaacaatgaatttcacctccctggcctgtacaccacctccttgccccacacctccatatcttcatctgttaatggaaattatggtaacctcattgggcctttgtggaaattagacaataggcaaaaagtcttcacactttctaacaggttaaacaattaagtgttattattaggtctagaactgtatgcagattttccaygttagggaaatgaaaagcgataggtagttataacagagaggtttaatgagctgttcatccagcagggtgtctctggtttgaaagggtacrtctgtctctacatggatttctaatgccctgcctgggtttaaaaagtagagtccaggttgaccaagatgtgcttcttaggagaaataaatggggagagagggagtgtgtttggcttctcactgaacaactctgtccctgccacactctacccctgccacactctgcccccagcatctccccagctcacacattccctacccaggaagcctcgcctggcaatggccaagctggactatttttctcctgtcctgagaaatagcccacacgcatcagcaggcctgtgtttccagcttgcccacataagcaaattttcttctcattgtggcttgcgtatgcctagtgcttcttaactcaagaaacaaatccctcagtcactcactaacccattttaccatgtcctcaaaactgtttttgcaaataggcaacacaacatgggagaatttggagaggcagcaggattttgagatgtgtctgcattagctcggggtcccaggttaacctgcaggccctcygtagttgtctgccatrttagggctacacctagcctcctagtgccaggtgaagaagaggataggcagagaccccagactccttccagggctgagagggtgcagcctttagccagatgagtccctcggctgagagcctttggtctggggtctaacccaccatatctggaggcccagccacaggctgctctgccagcccccgatggaggaagagctcttggaacatgcctctggctccttcctctctgccacctgctctgggggcctggtttcagggtagggtggaggtgctgtttgggtggagctggcccaagggagaagagtcaaagcaggactatggggcaactcaagggcactgatgctgtgcagtgtggggtagggaaggccctaaggccacatggcagtagcgctcaagcttctgaagctcgtctgggggggtaaaggacagagatttggttaaaaatgaagcaggatgggtgtaaatgacccctgaaaataaggaagaacttgaactacccacgacgtcctgattcagagataatctttccatctttgaagtcatccagtagaggtggacacctgtcctgggtgggaagggagtgaaagggttgatgtgatgtcccctgtatgtccgcctgtgctaggcccaataaggccaggccgggtaaccgccacaatcctcactggcttcattygagttcttctgttcttctctgctccaccccaagttgcccacaggccccagtcttgtcytgtagctcaatgcaggcacccagcaaaccctgaggagcttctcagaattgtgtccactgggctgactgagcaggtgcccaggttcccaggttgcacaattctaaggtcactcagagggggactggcagagccaagaaggtcttgaccagaagcaggccccactctgccactgcactctccttcctccaagagtagaaaagaatctcccctgctcctgaacaatgtcaacatcgccaggaccacgcctgttgagtagctccgtgcccacaccaatgctagccttttccagacccatggtctcactggctctcccacacccctgtgtgacaggtgtggccagtgtgttgcaaggatgatatggcaaatcagagcggcttgctgtcttgctcggggccccccatttaagtggtggagatagaatttagatccaggtgtccctgacttcacagccagagctctttctcaggctgcctcccacrgatctcaggagcacattagaaagccaagagccatttgcaacatcttatttaatctaaaacttacatgataatgatggatgatggatgatgcggtttattaacttttaaagaaatactttcaactaatcaccagttaccaacaaaattcacatagatcattttaagagttctgtaatcaccttcagattaatatgattttaaaacaatatttttaaaaaatagatctcacctttggttaggtgtcctggaactgctggtaatggcgtctttctctgatggtaccagaaataatggaacttccttgaagctgatagccaatgaaatgaggagggggatggtgaaatgcctttttcttctgtacaccattccacctgatagtaacatcacaagtgaccacaggcaaaattctagaaccttgtctgaaagggaggagagcagagactgaatctcatttcctggatcctaacaggcacatttagctccacttctttcattcctctgtcctcactcccctgtcaacttctaaaacagagtagcaagagcagcaggctgtggcaggccaactccacatgctcatggctctggagggctcagcacaggtccttttcaaggtgatgaccctcactgtctccagcctgggctctgcccttgcctatagccttaagagcagcctaccctccagaactgggtgggtggcagagtcgcagacacagcaggagaaccatatcttcacttgaccctttacaagctaaagcagtatatcggagcatgttttgcttctgcttattgttgggtgttgcttgcttggatacatggcccaaatagatgacttctctattagggatgaagaggtaaatcccagcctgagggttgctttctgcttatggaaaatctgccaagtaaagaattgaatgcagagggatggagagcccaggacagaagatgtgacggtggggctatgatgggaatgtgaagcagcactgtccccctgggacacacgggcagccaggccttgtccagactgagcccggcagggtcctgacacagaccatrcaggtggagcagagagtatgtggggactgggtctgtaggtacctgaatagaactgtggcagaggggatggatggagagaacggatatgatttggcttggtgtggtggagcatcttgagaagacctggtcttgggggtagaggagagtcttatggagttggggaagaaacggctggaaaaggagcaaaggggcaccttggaggctgaggagctgggctctgtaatctctgctgaagagaagagaggtttcaggtgaagggagaggggctcctccccacactctccccagtattgcattttgttacccttttttcctaccagggcagtccacaatgggacttctttggtttgatatttaagtcttaattttagccatgtacattagtatggccttttaaaggaaccatttggccataggtagcaaaatggtaaatactcatactttttaacccagtagcaccacagctactcacagaagtacccagagacatgtgccaaaaggtgctcctggaaacgtcagttgtgagaacaaagcctgtcatgggggcggtgaatcagttaggatccagctgtgcaaccctgccccgtggttgcagagatgaatgcgaaagggcagtgtgagccggtctccagggctgctgcagcacaagggaggctgggtggagaaccgggtgtacgatgtgatcccatgtatgattgaagttttttagaaacaaacaacaaaaaaawctatgtaggcatataggcaggcatatgggtaaaacattttctggaacatacactggaaactggtgactgtggacccttcttgggagacccttaggccatatctcatggccttccacgttgtttgcattttatccacgagcaaaacaaggggtcggggcagggataaagaaggccgagatgtggcaggggaattctgtgtgggttgtgaaggaggcccccragcctgaggctgcatgtccyctggaattcttgaggcagcagcttgttctggcatcacagyggagggacactgactgcaagaacctaaccttcagcaggccagggtggggcargaagagctggatgacagtctccctgtgctgtccgctgagagttgctctgggatttgggaagtctgcagctttcctgaacaccctggtcccgtgaagcccaggcaagccccacctctcccctgtttgtattcttgccttggtatatttagtcaccaccttggttttctgtcccacaggagataccccggctctgacaggatcatgctgcagaagtggcaggtacagtagctcctccagagggaagccctctgggaatgcaaaccagagaatggctcaggccccagcgatggagaggaagtgtgtggatcaaccaagaagggatcttattatttattattattattatttctttgagatggagtttcactcttgttgcccaagctggagtgcagtggcatgatctcagctcacggcaacctctgtctcttgggttcaagcgattctcctgcctcagcctcccaagtagctgggattacaggcacctaccactaggccaagcgaatttttgtatttttagtagagacagggtttcaccatgctggccaggctggtcttgaactcctgacctcaggcgatccacccacctcagccacccaaagggctgagattacaggcatgagccactgtgcccagctgggatcttatttttctaatttaccaaaatgtctcagacatttccctgaccagatgtcggtgatggagtacaaatcttgcacattggagtcagagctggggaatgtgcgtgtgtgcgtgtgtgtgtgtgtgygygcgcacgcgcatgtgcatgtacctgtacactatggatgcctccgagtgggtacacacaccccatctgtgaagatacacatgtatacagccacatagggggcagagcatgggtgtcaattcttgttcctggaagatacacgtggctcccagcctggacaagttgacattcagcccagggttcycaaagaaaggaagagaccctaaaagaggcagttgtagagattcggggacaatgagaaagtaggtcttagtcactcaggtccaaaatcctctcccaaggggcaggttgaggaaaggagagcccctgaacatacaggccacatgtcagagatgacggctgtgttggattgctcactcattcagcggccttggtggattttattcccaatacgggccctgtctccatttgtgactgttcatctggaggcagagggcccttaagagtgagcatcaccccaacaggcagggacagggaataggcagttcccaaagccccagaggaagccagaccatcaagcctgggagtgagggcctctgtctctgggactgccatggcccatctgcttattttctaaccatcaataggtcagcagtcagttcacccacagcatttgtgctatgattttagtcaacttctgagaactgcatccaacagttaacacaaaagcatgttttatccttggtgttggatgctgaactgcattgggttttttttttttccttgctgactttgcttcccgaatatacttgcctccgttcatactgaaatttgtgtgtgggtcatgcatgagatgtgcacaaagtaaccgaggggctggctgcctgtcctcacccacagagccagggcctgctgccgaggcctgagggtgggacccatggctttgcaggagcatcaaacgtatttggtttatcccctttctgtctcttctggtagaaaagggacatcagcaattttgagtatctcatgtacctcaacaccgcggctgggagaacctgcaatgactacatgcagtacccagtgttcccctgggtcctcgcagactacacctcagaggtaagttcctcacgtggaaaccacagctgccctcaggtgttcggacgttgataacagagaccctaagtcagcatgcagagcctctgctaggaggttccgtcacatgaacctgggtacctggrcctaaaggctgctgaagctcagatctcttttttttttttgagatggagtcttacttcatcgcccaggctggagtgcaaaggcgcaatctctgctcaccgcaacttccgcctcctgggttcaagcgattctcctgcctcagtctcctgagtagctgggattacaggagtgcaccaccatgcctggctaattttttttgtattttagtagagagggggtttcaccatgttggccaggctggtctcgaactcctgacctcaaatgattctcccgcctcggcctcccaaagtgctgggattacaggcatgagccactgtgcccggcctcagatctcttaaccccactgtggcctttggtatttggstgcctgggttcctgtcctggatccccctgtggaatgatcaacacaactaacatagttgctaacatgagccccagggggcttcctggcttactctccacagtgaaggcacctgatgccatctaccaagatggtgccatgggtcagcccttgtggggtgaggcagtcacaggtgaagtgggccatggaatttgttcctaaaatcaatgtgtgcaggagaggggcctgggaaagaaaggagagagagacacagggatacagacacacagaaaggacaagctactcttgctgtaacttgagttcagtgacagagatgatggtgtctgrgcctcatctgggatctggactgagatgtgtagtgacaggggaggttgatggtgagatgacaagaacagatccctcatctcttttagcctgcacccctgcgccccagcaggcagggaaaggatggggagtaaaactccacagctggaccagggtgatttctgtgcttctatggggacaaccaaactatggagcagtgtcctggccacccgggctctggccatctggagaggtgctgggccatatgtaaagcacacaaggtggctgagccacttgttcagatgagcctggccagtcctgcgtagggctgcttggatggcagaccttcaggatttgggagaaggagactcagtcctttgtgacctctcatcccttcttaagacatttaatgcagcaaaacgtttctcactagcactggctgctgcttattgcactaatggtccatcggaggctgaggcatttcaaacacaaaacctactcacatgttgcaaagtggtggtttgcaagccttttttgtttaggtcatactaggtatttaaaaccttgattatttatcaacttaaaaattaggagatttctcctttaaaaaaatctggatttccaatatcttttggaaaacggtgagatctggcaactaggaatttttctgagctggcaagattgtgaaagctgagtgtgggtctccgtgtgtcccctccagcactcactgggatcttaagaggggccatttcactcttgcccctgcttctccctggcttttgcaggcatttgagatagtgacacacttggcccccagtggagctttgaggattcactgctagtggaaagaaagggttatgagccaggcgcagtggcttatgtctgtaatcctggcactttgggaggccgaagcaggaggattgcttgagcccaggagttcaagaccagcctggccaacatagtgagaccctgtctctatcaaaaatgcaaaaattagcgaggcatggtggcacgcacctgtagtcccagctacttgggaggctgaggtgggaggatcacttgagctcaggaggtcgaggctgcagtgagccaggaccactccactccataccagcctgggcaacagagcgagattctgtctcagaaaaaagaaaagaaggagagatacacaggtacctcctcctataaagaaatgcaaaccccagcaattcttggctcctctgctaacatrcagaacctgaaaagaaaaagtttcccagagcacctggccctgaaactggtcctgttttctctgcagtatattccaagagagggaaggggcgctcacagcatgctttcactgcccagaaaggagtgaacctccaggaaaaatgagcaagttcctctcatttcctccctgaacagatgacttctaacttcctgtaaaatcagtttgattctaagcaaggaccctgaactattggagtacataatgcagtttaggagccaagtgcctcatagacaacacgagttcttttaaaagtgtcttttcagtagctggaggccatgttctgatttgggtcaacttggaacaggttgagtgtgaactcagtcttcccctcctcttatttttcatttctccctttttaagtctttgtggatcactggctctggggccataaaaccccagcctgccagctaaccaccagaggcaggtcagaccaaatgactgtaaatcaataaagagaaccataaaactcaagagcgtggctcctagggcacaagcgggtctggggagttaactccagctgcacatctgccttctagacattgaacttggcaaatccgaagattttccgggatctttcaaagcccatgggggctcagaccaaggaaaggaagctgaaatttatccagaggtttaaagaagttgagaaaactgaaggtgagtagatccagcttgatttttggtgcagtgttattcatcgggatgccctaaaatgatagttgataacaattaaggtggtcacctagcctacaagtaattgcatttgaatagaggactctaacctggtggtaggaagtgcctggggagcttctagaaaatactgatgtccaggcctcacctctagaaatttggatttaaataagtccgtggtgtggcacagcccaggggattctaacatgcagcctggctggagaaatataatgctaagaggtaatgactccatgcctaggggcaggcaatagcagaataaactaacatttattcagcactttctctctgccaggggcaggccagcctgtgtttgtatattacagtggtccatttcaaagagaaggaaagtgaaactcagagagtttaagcaacttgctcaagatcacagcctctaaatggcagagcctgcatttgtgtgactctagctcccaaactttgtccatctacacgccatctttagacgttttgccacattcacgtgccgtctgtgatcttattgcctgaatgttttwctttaggtctgttcacttcctaaacgtcaatgaatatatgtttttaatgccgttcatgaacacagtgtagcacacatatctgccacgtgtgagtgcaggtaaggaagcagccctcaagcatgtgtttttgttgcaggagacatgactgtccagtgccactactacacccactactcctcggccatcatcgtggcctcctacctggtccggatgccacccttcacccaggccttctgcgctctgcaggtgagctgctgccactctctgtacacacacacacacacacacacacacacatacgcctgtatcacaagactaagacctgtgcttgaacaaagacaggatgcctctgctaaaaactyagtcattagccagtgattcccagttgacattggctccaggattctggytcaccagccaaggcaggctgttcttcctcagttacacctgcacatctgcccaacaaagtcttgcaaaatgattctaaaaaataagaaatgagacatgaaaaaaatgatttaacataaataagatttagtggaaaaagaaaaagcaggaaacttggagactagaaaggcaggcggtcaaggattagaaaaataaatacgagaaggaacaatgaaaagaatatgactcaagacatcggaatgcataaatctgtaccaagaacaaactgaaaggcttcgaaggacaaaaccaacttacccacccatacgctaacagaccattataccagcttacggtcgccaggtttaaaataaaaatacatgatacctagttaaacttgaattccagataaactataaattattggttgtttatacaaaatttaagtttagctgggcctcctgtattgtatatggccactctggtgtccaagtgttgccaggttggtgtccaaggcatgggggatttctgggacagagtctttcatgggcagtgctgtgagggtgctgagaagttcctttcccctcttcccctcacaaccctatcactgggatcctgcttccaaggagcccctttatcccagggcacagcttttgaacggggagatagccctcagatagggcagctggctcggctgactctaaagagaatatagcacagggagtatgggctgccctgatccagaccctgcaatggtctgacggagagaaaggcatgagctgggatgggcaacaggccactgaacacacagacttgttctgacacctaagcctcatctcagaaaagcctgggtatcccaagaactgtgagtttgggactgacctcacctgtgaggtcactctttatggtcactcagaggaccttgaccctgagagaccaaaggccaccctgcatcaacactaaagccaactctgagccctggggcaggaatgggtaggcaaggtcaaggcactttctccaaataaggagcaaacgtcctcctgtcttccattacttggcgcagccttctccctccttgacggcataacacgtctagacattgtataaccccctctccctggaaattcactcaaaaataataaatgtgcttcccctgagcctttctcaggcaaaaagcattttaagtaagtttggtttggagaacaaatggtcccagagctgcaccccatgccaggaatcccatccagatgttgctcattaatccacaagaaatgatgatcaccgttgacgatgatagtgatggattcygccactggtttctatcctgggaatttaagtgtttaagtgttcagaatgctttggagtttcctgttgccccttcaggaggctgcattataacccaaaaccccagctctacctgttgctaaggatcttttcacatcgggaggagacagagtgaaatagaaacagtctcagctgtgagatttacatcacagctctgccacttaatagatgcaaaatcttctgcaagttattttacctctggaaatgagggttaattatgcacatctctctggactataggctgttgagaagattaaatgagaaaatgtgcagagaacccccagctcaaggcttgatgctacataggtgatcaatcactgttagttcccttcttccctctgcaatcagctagatctaatctgagcaggtctgaacttgtccaggctggtctcctctggtttaagctaatttaaggcagtctggactgcatcaaagtattccaacttagcatgagctagacctaacaggtgtgttgtgaaccaacgggatatctgggctatggccactttgaagctaatcactggtttaagcttattttagccagtctggtccattggtgaccaggtaaaattagtttgagatggtctaaacccatgtgagagggtcacaaccaattgtccatgcttttaggtgacacaaatgcagtcatcttaccttgagcccttttgactcccatgttgaagtcactgatgtaactgagttttggggctcagatctgtcttgggtagattgacccatccaagttggagtcatctgggctgtctctacatgcttctaaattgggtctcactttcttacttttaaatgactcctctagtgggtcacacctggcccgagcctttgaaccagcaaaagaaagagccaccttcagctttttccttaggaaaaaagaattttagctctcgagaggatgagtataaaggctacatagtctacctctgtgggaggacacaccaggctcctctttgagagtgctggggccttggcagacctccttaagaatattctggcatcttcttgaagtcaggctcttccctccatcccatcctgccycctagggggaggcctgtatcttctccagagacctttgcttcactcctgtggtggctggaaaggagcctcccatagtctcagcagcccaaggcactactcccaacctggggtagatgatggagtggggaagagtgagagacgtggggaggctgtggaacccaggcaaggaagccagagccagtggacatgtaagagtcagcatgggagagcacacgtctccattctgctttgagcaaatgctaccacccgcctattaccacagataagccagagtggagacatacgtggtgagcctggggctcatgtcccagcatccccagggctgcgtgtctgactttgctcagatcgctttctttcttagggttcagtctccttggtgagatcaaggaggtgggtaggaggatcacctctgaaggcctttccgtaacagctccaatctctgattgctcattaagcacctactatgcacctggatggtgctaagtaccttacagctgttatttaaactattttatacttatttgttgtggaaaatatgcataataagaaatttacccttttaaccatttttaagggcacagctcagtgtcattaagtgcatacacatggttgtgcagccatcgccaccatctgcctccagaactttttcatcttcccaaacccaaactctgaaaccatgaaacaataactctccaatcgcccctccccacagcacccagcaaccactgttctactttctgtctctatgaatgactactctaagcctcttataagtggaattatgcaatgtttgtccttttgtgactggcttcttgcacttagcgtaacgtcctcaaggttcatccattgttgcggcatgtgtcagtttcctacggctgagtctgcgcccctgtatttgtagaccacatgttgtttatcattcgtccatggctggggtgcttyctccctctgatgacaatgaagggtgctgctgtgaacactgctgtgcctccttggaccctcacaagcttgtgagaggctgctgtgattaatctcaggatactgagtctctgggaggtcacatccctcaggaaatgacaagggagatgagatgggttctagccctggggacaccaagcctaaaacactcatggtaaataaagcaaggtgggatctacagaggttgtccagaggggacacagtgctcagaggaaagggacatgtgccattttcaaggccacattttcagtagaatagtggggagtccctcgtgcagcatcacacacaggtgcacaggcatgcagtgtgacatgtaggcagtcacccggtactgcagcaggcatgcagtgtgctggctgcatgtgtgtgcagcrtggcccctggtgcccccagtgcagagtgacaggcagcacaacagctctgccatggagcacctttgctgtcacgtactgtatgcctgtgtggcacacccagtgcggtctgctgggttgcagagaggcaggcatggagttctctgggcactgtggcccatttaccctgcactgtgcagagactgtggacagcacagagaccccctattgctgtgcggtacattcggaacactgggtataaggagtgttttattcccttcaggtttaagtgttcttaggtttgagctggtcttataattgacacatacttatatccttgctgtgtttgtttgtttttctgtcccaagcctgttattacaataagatttttacaatccagaaaatatggtatatatatgtactgtgtgatctgagcaggtggcacatgcaggcagtgtgaccaggcatgggtcagctttgagctctgttttccccactttcttggaggtgtgaactcgtctgtctgccagggcagagggcttatctcccccagcagcagccccaagatgctgtagttcttttgttcatttgttttttgagacatggtcttgctctgtcactcaggctagagtacagtggcatgatcatagttcatagcagcctggaactccagggctcgagcaattttcctgcttcagcctcctgagtagctaggactatagatgtgcaccmccactcctggataattaaacaaacaagcaaacaaaaacaaacaaacaaaaacaaagaaacaaaaaaaagcacacattttgtaaagacggggtcttattatgttgcccaagctggaaaatgttatagttcttaggagtcttgcctgcctagagcaagtgtctgtgagtctccagaaagctgagtcactaggaggtcaggcccctgctggggtcccagcccaggcacctgtttctgctccagtaaaagcaccagttgctctcaggcctgagatcagacccacccgaggtggggcccagcaaggcagccggcgcccaccaaagacacagcagcggtggctgctgctgcatttaataagaaacagagataaagtgctgtgttaattaagtcacagcccatgtgaagtcagctgttaccagcagtggggaagggttttccgaaccacctgaggcgagatggctggtttttgtacaagacagatgctaactgcagagagaatggagaaccgtggggcagcacttggcccatcctggctgttgacttagaagctcctggaggggtcagtgccaggattcttggtggagcgtgtgccagggaaggcgaggaacctggagcgtctgtgtctgtgctcacacccaggtggaccatgcctgcctcttcacttgctgcctgcagctcagcccytgcctctgaggcaagcaacccacctcctggtaccctaaggctcacatagggccagcctacccaatgcagccagggctgtggggctagacatagaaactgccagcctccctctgattacagtgaaagggcatgggatctgtaagggcccaaagtgtgacttgaggagaatcattcaggatctccaacrccgtctggtttttatcatacagacttgaggagtattggaaaagcacgtgcaatagagacagacagtcccgggataatctcctggctctagaactttctaattggcattattgaacaayggagcctcagtttcttcatcctttaaaataacccctagctgggagggtggtgaggactaaaggagatacgacatgagccattttggctgaccttagtgtcccctacgtgcccaccctcctcctcctaatgcaggcagcgtggtttcagcaagtcttgacgggttcactcatttagaaaagagccaccacctacaggaaggaaagctaatggccactctggggtcatcccgtcctctgtgagagcaagaccaaggaggcagctggaccagtgcgtgggcttcccaacgccatgagggtcctatgcctttagcttattcagtagcgtgtcagggcctggctttttcctgcagaggctcagagaatgctgggtccagctttcctttcccctcacacatttgccccgttacttctgaggtgctgttgctaccaaaagctgccctgacagttcaggctctccttcctgttgtcatcccacagtccttcagattccccaccctcctacctctgtcctcgccactggaagatcccgcctctcctcacttccccctgtaccccacctcctaccttccataacttctatccccttctcctttggagctcctggttgccttccccatgcacactgagatcagggcccaagcccaggattgctccctagttctaatcctagtctgtgaagggaaaaggacacaggggctgggttcatttggcacctctttctatgtgcctgcttcatcgcatgagatatgtctctctctctctctctctctctctctctctcwcacacacacacacacacacacacacacaattgctttcacaccaacagctatcatccagggttcatagacaagggcatgggcggttaaagagattaagaaactcacttgagttcatcctgcaagttaagtgggcactgaacttcctgcccaagccagtctgcttctgaagccagtgtgctttccaccgttgcatactgcctctttgattggctaaagacagcaggttagatcaactgatatatcaacagggtcctgtaagtgagttgtttgcatgggtacttttaaattactggaaagaatatctgcagtgagaatgggttgtcagcctgctgataaaaccacttccatatccagatgtggcagcaggttgatttggatcagtgttatcaggaaggaagaatagactttctagcatatattatagaaatatctgtgcatcttggtttccttcagcatgtgcagttactgaatttcctgtgaatgtgggccaagaattgaagccacattggagaggggtttatgaatgtctaatagtgattgaaatgctcatccataggcaatggtgcacatagactttgtgtcctctcatgaaaggagtatttcctttaatatagaacatttcttttcaggttttccagctttagccatcataccgtaattatagactgtcccctgattttaacttggatcaatgtgcaggaatagtccttgctagccacttcttttcctattattttgccctcaattttgcttcatctcttagcaatatttagcacctcctaaaggattttaattgagaagaggtacctaggattatattgtttctgaactcttcaatattcaaaatgttcccacatctttacatgtgagtgatgtcttaactgagcacaaaatccaacaactgtaaccttttgcctcagaatcctctaggcttggctggctccattgtcttctggcctaaatgtcacatgggaaaaccttctgccaataagaaattgttcctttgttggcaataataaccttgctattattttttacagtttgtttggatacaggtaggatttgttgcagaacagattccagagcagctcttggttcaggaattctctttgatcactttgttcccttccaagttctagacttaattgtgctggtttatttcatttgggtctggactttccttagatagacactctgtaaaccttgactgggtctctctgcctcttaccttcttgccccatttttccctcttctctttctttcctccttccttcctttcggagaattcaatcttagctgggactgctcgctggcagccaccagagtttacatcaacccacagacttacaatacaagtaacaaagcaactccactttttcttctagggaatttggtgttttcttttgtattgcagaagtgagaagacccatkaattttgaaacaaatgtatgcaaatacatttattaatatagcaaataggaaaatcagttattgcttcctttataaataatacaggcctaagttttaaagatattactttagctaaaatgcattagacagctgtgaaaaaaataacagttttctttgtggtaatatctttaaccagatttgtagcactaacaatatttcgtatgtatatattatttttatttaatacaggtaacctttttattaccaaatcatattgtttctcaggagactaccatcagcattcataaaagctgcaaaagggaaacaggacgaggagtaggcatcaatctcccgcagatgcaaggcttgggctgcagattaaatatacaatgctcctaatacatttcaatgagtgactcgttaggtgaatatttatttcgacaccccacccccattttatttccatttcaatttaaatttgatggtggacgtcattccctaatttcaaccaagagcaaagcgaccttggggaaaagccacatgtttaaagctgcccatgtgctgtgcttgcttgagtcagtgtccctgtccctgtgtggggaatgacccacagatctcacttgatctgactcagtaaatggaccagccagaccatgaccctcaagatgtccaggtgtggccaccttgggtgtgtggtaggttcccccctctcagaaagagctgagttcccccttggcccacacatagtggcttcagtttgtcccaggtccagggattccccaggaatctggcatggggcaaagcacgccctgtggagttgcatccatgggtttgccccagttctgccattcactgccttgggaaaaatcagtgtactttgaggagcctcctttttctggtctgccaaatggaaacaccaattccttcctgatgcagctgctgtgaggattaggagagatcatctgagcatggaccagacatgccaagagaaggcccctgcccttttttacctccacccacccctgcagctgcccccaaggcttccttgggtaaatgcagagggagaccctcagccctctgagcagggaagggagtggcgggcacagagtgggcactgctgtggccctgccccttgttccacatgtgtgctctgcagaagatggcagaaggaggacaagtttttgttctacaaaggcccagccttgatgaggacaagtgaactattgaatcccaggcagaaggctatcccaaaacttacttagacccaaggctcaatttcagaaactgtctcctgaagtccctccacccccagcaccttcatttctctaaccaggacctggagggaggcacctctctgcctcctccaaacccccaagaccacctggtgaataaggatagcatcagctgaagagtttgacaattcacatgagagaatctggggaaagaatgtgcctgaattcttacatggcccaacctcgacagccaggcctggggctgtaccaggccacctgtggccatgggccttgggaccagggctggccctggcagaggctgtggacatcatgtcctttgtggaccagcctcctgccccttgaacctgaaatttctccatctctccaccctcagacccattctctcttatcgaagccaagacccctggtcccagagtctccttcctgcccacgtctctctctcaccaaatgccatgagctgtgtgttggatgtcaccagggccctcccctagcgagctctcctccctcctcccttcaccctcctccctctgcttcttgctctcctgccacctctgctgctcacccaagccttgtcctctgctcagaacactgccatattccccatcagcaagcttccagactcacttccggggcgcctctccaggaaacttttgctgacctcccacatagaaggttcacccacttctttgtcctatggttggttctttatttcctgcctgtggaacttggccatgagcctctcaggagccgagtcccagtcactagcactcttgctgcctcttgttgagcacctaattcagagctggccctctgcagtcttggaagtgctcagatgtggttttcctgtttctgatatgaactcagatttccataggagggaaacatggattgattaacacggatcatgcattctgccttgaagctctggagcaaggttccagagactaatgaaggaaccggtggctggagaaccacggcacacacatctgggctgatgggtacacgtgtgtgaggagagtaaatgagaggagctaatggtggaacccgtgcctctgaggcagaatggacggtgcctggccagcaggarggtgccagtgagagcggctggtcatgttggctccatttcccccagggcggaagcttcgacgtggcagacagaatgttccacagtgtgaagagcacgtgggagtcggcctccagagagaacatgagtgacrtcagggagctgaccccagagttcttctacctgcctgagttcttaaccaactgcaacggggtagagttcggtaagtggaggcctggtgaggccgggtgagtggcgttgcagggtgctctttcccacagcccctgggtgatgaccaacatcatcyggacctttgctaggccctccccaggacctcaacttcgggtgaggtctccactgggcagcagtgcccagaaggaaaggtggttgctgaggaagggcgctggccccaggctgccaggacagtgctgagccaccacccracctgcgacttttcctccgagggtcccaggtctcagttggcagtgaggcagtggctgagaccaggggctcttctgtgtagcccaggcctggcactgcctttctgcctcgagaccttgggcaagctcctggccccgaccagtcccatttcctccatgtcccacaaatgggttcatgtggactccaagggcaggacccagagatgctgggtgtcctggggtagactgctgggtgggatcccagggcagctggacgggcacttatggcagctccttcctgaactgcaggccccagcctatgatgcagcagggcttcttgctgctatagaggtggaacaaacaatctaggagaccacggtgggtagctcccctggggactgtttgtatgtctcggagcttccactgcaaacagttgcaaggctgagtcagggcaatttgcagagcagatgcgtggtcacagcctgggcaggtcaccggcctggctgggaatcatcttctgcagagaacacgcatgagccatcaccaatgcatacctcgggctctagagccccccctcgtcagtgttctccttctgcctccggacagcacataagggcatgcacctgagccaggccagatgcagcccctgtagggggtacagcagaggagattagtccctgcaaaaccttgtgcaggggttttcagccctagacatgcagcccacatccctgaggagaaggccagacagtgagccaggcccygtgagtctgacctatggaacctggggaccttggtggtgttcaaatcgttagacacctcacatgcgtcaggggtgagaagtgaacaaattcaaaggatggatcccccaaagcgtgaggagtcccacagcaggagtcactcagggagggtggcagccaggaggaggcggctggccagcccggggttagagcactgaccagagtacccactctgtcttggaaatgaagccagactcttctgcaggaggcatgatgggctcagctgcagaaatgatggctcctaccagcaatggaggccaagagagcaaatgtcctcagaaaagtcaggagaacaagtggttattgagcacctactgtatatagggacctttttttttaggcactggggatttagttgggtctcctgggatggcatgtcctgaagatgtttacattctgtgtgaggataggaaaaatggaagagaaaatatagacaatttctatactgtaagtgaaacactgttggatgctgagaagtcctatgaggaaaataggtaggaaaatggtttgaggatgactcagcaagacctgagtttctctggtcctcaggaaggacctgttgaggaggtggcaggtgagctgagatgagtgatgagaagggccaggccaggcagctcagtagccaagagagagcaggggagcttttattccagctgcttcttgcaggccctggggagktcaggcaagactgtagctcacatttatggagtagccatcatatgcctgacgtcattctaagcatgtaatgtgtattttctcctttaatcattatgccagccctatgagataattcctgtcatcaccttaaattttacaggtggaaaatgaatctcaaagaagtgaagtggcttgtgcaaggttgggcagctaatggggaggagggagacttgggttgagtccagcctcctcattctactgtcaggggaatctctgtctaaaaaccttgctgtcctcgccttaaaaacggagagaaaatgcataaattatcaagttagaatgaagattcagtgaggtgatgtgtggccagggcctagcctagctcctggcgtggagtgaggtgcttagaatttgccagcttgcaccactatcactgtatctcctgattgtttaatgctgtgtaaaaagcacccagaagaaaggcacagtacagtgcagaggaagatataccacactgatgacactgaaatcatttcagatgacttgcaaagcaagcactagcactgcctgggaagcaaggagggcctcctggaggaggcaaaggcctagaagccatgctgaggggtcattccaggcagagaagrttgaaagcagcatggtctgcagagaacataactcacgttcagacctacacaaaatcagcaatcctgggcaatgtgtattttacatcccccagttcctagcctgatttgagttacccaaatctctgctgcttctcatcccatgcaggctgcatgcaggacgggactrtgctaggagacgtgcagctccctccctgggctgatggggaccctcggaaattcatcagcctgcacagaaaggtgagtcaggccaggacccctggtatcctgctggggacctgaacatcccctcaagttccaccgaggctttctgtccaagtggagggccagtgascagcactgtgaggctyatgtctggaaaacccagagaagggatggggtctataccttaggttggcaaggaaaggcttgagctctgggctgtttcaagagctccagtagaccctgcctgggtgccagcttggtgagggtttcactggaggaagtgagcttagtgccctggagggcaggtcagtgtcctcagccagccctacaagaacatccactccctgggcctgactgctcagcatagttcagagagggtttggagcctcccagggactcccactggccaaaaattttccagaactggggagaaattggcttattacccaaaaaactggacatgggtagagaccagaggtcattagggacacatgctgaatcaaatttctgggttagtttaagcacatgaaagacgttcaacatcattggtcaccagggagaaataaattaaaacyaccatgagatgagatgctatgacatacccaccggagtggcttaaatttaaaagaccagtgaaaccaatagttgatgaaaatgtggagcaactggaatgcatgagacatcaatggtgggaaaagcaaaacggtacaaccactttgtacaaaagcttggtaatttttttaaaaatttgcaggtgcatttgccatattacccagcattttcccttgtagatatttactccagaaaattgaaagcatgtccacacaaaaacttgtgcatgaatcttcaccaggtttattcaaactagtcaaaaacaaaactcaaatgtccatcagctggtgaacagataaacaaatgatatatccacacacacacaatggaatgctactcagcagtaaaaaggagcagatttactgaatcagtttacacagaacaacatgaatgagttttaatgcattatcctacatgaaagaagccataactcagggctacatatcatgtgatttttatatacaggcatgaaatgtgacatttagaggcaaactatagggacagaaaacaaattagtggttcctaagatctgaagtaggagagtgaccacaaaggaacacacggggggactttttgagccgagggaaacgttctatgtcttgactgtggtgatggttacatgactgaatgaatttataaaaacactttgaactgggcattttaaaagggcaagttttattgtatgtaaattacacctaaaaagtaaaaataacctgaggcaggtgtgactagtggcaacaaacctatgccttttcctgtccttttctgcaaagagaaagttcttcttgttttattcttgcctctggaaactcagtgataggagtcatccctctcagagcccactgtcttgagtacttgggccagagatgaatgtaactgcaggcagcagcagccatagtctgataaaagacagaggtacacatgattcaattgaccagagtgttgctggaatgatggaccactacatctaagctggataaagatgtagccaaaaacaggtgggtgctgatataatgcaaagaagaaaagggacaaggggacctgaggttgtgacaaggtagaagaagagccttaggaagcatgtgaacacccagaaaggtgaggaggatgtgacttttgccaagtggatgtttgaatgagtgctttagaagatgaggcagttatggatactgacatgggttaaggtgtggccatgggaatggtgactttaggtggaatgaaggcaaaaatytttggagatgtggagcttaaggaaccgagaggccagagatcacagtcactgaggatgatggcagatcttggagaagaagggaagatatggccaggaatcaccatctttgatgaatgaggagaacagagagaagttgttggaagacagcagtgaagatgaggagtgagtacagctagatctcatgcagcacagagaagcagatcttttgtgattttttttttacaagaggacagaggaccaatactctggaggtggcaataaggactgaggagacaccagcccaacgtcctggccccagacatatgggttatgtccagcaagtggccaccacttgaacttgctgaaggagaactggtggtcttagggaaagccaggcttcatctaaggaaaagaggtggaggaatgtttgggaagagcttgaggacatgggatatgtgttggttagcaagaggtaagaagaagggccagcagaagggtcagctgtcctggcctatgatctgccctcacctgggtatgcctttagtggttctgtggcaaccaccaacaaatggcttcatgcaaacatctccagaagttcatgaggtataccccaagccaggtggtaggcttgggagagccatacctttcattacccctcgtatgacatgactcaaatgtggccttcttggctccaaagccactttaatcatagacctcagaaaagccaacttagcacaggtgacctggcttcttcagatccaggtgtgtagggcagcttgtcctcccagaggaccaacaaggggagcccagacaatcccaaatgaacattttgaggctctgggcacctagccctgaagctaggttctattcagtagaaacaggtgccacctctcagatagactgtgatatcgagacactgggccatacttcctcttgctcatgtgtgacacctgatgagaattattgccaacctgggtcccccattctgagccagtgccacccatctgggctctatgcatgaaagatccagcatgcttggctcttatgctaaattctttggatgacaccttttatgaggggcagatgttgctgacttctggtgggagctgtggtcctgaatgggatgaggtttacttctcacttaaaggttgtaaactcggatccaggctccatgtttgagttgagaatgtctcctgtcctcccatctggagtcagtgagcctgagcatggacagaatgttcctcaggtctgtgagtgcgtgggtgagaaactccttgcctgctgcatgcccccagctagacacagctgccccagtgaaggaagttcacattcctgggggctaagctgtacctcagaagcaggttctatcatttctgtgccagggatgatttagaagatgcccacacccatgtccagaattccccagtaactgagtgaagtgagatctgctcagtgagactggatgccccctgtgaggttctgaggaatgaaaactgggggctggagtgttaggatcaaaaaccacacatgagcctgccctagaagtgggttaattatacctgccaccaaaaggcggtgttcatgggaggaaacaacacctgtgaaacagccagtgcctggcatcgtatgtgcttagtgaaatcacctaactcctggagctccctgtgtgtcagccgtggacacaacttaattcttacatgaacctgctaagaaggtacaattgttcattttacagatgaagaaaccaaggaacagtgatgttaaggaatgtgtacatggcagcacccacacccactgtgctcgagagcacggtctcctgatcactgcacttagcctccgcctyctgacactctctggtcagaaccagctctccttgtttcatatgtcacatctcagcaagaccccaagactttattttcagccttgtctcttccatttagatgtctttcccaggcctgcacctcatagatactgtggacaccatggttgttttatgacatggttgagctggggtggtgaaaacagtcagatctgatttgctgctggctggagacaggactagggtggccctcgggtggctggctcatcctgcmtctttgtgctcatcaagcccaggggctcatcaattatctcctctgtgcagggccagcactctgaagcatgtgccccttccaatctgtgcagcgagtgcatgagtmcmtgagtggcctgggttttaatgctctttgggtttttgttccaggccctggaaagtgactttgtcagtgccaacctccaccattggatagaccttatttttgggtayaagcagcaggggccagccgcagtggatgctgttaatatcttccacccctacttctacggtgacagaatggacctcagcagcatcactgaccccctcatcaaaagcaccatcctggggtttgtcagcaactttggacaggtgcccaaacaggtacagcatgccttgtmatttgccttgctttctcaaaagagtgtgtgcagtgtgaggacattctctcctggggtgaaagtgaaggagatggctgaagaggtgaaatggtcccccatcatcttcctgtgctttcaatatcaggcttaaccctcagttaccacctgatgttgatgcatatgatgacatcattagtgaaactagtgaaagttgtgtttgtctgtgactgatctgattttagacactacaatagatatgtggtaactaattacttgtgttcgtatctaccctacaggtttgttgtatccaatgacttaagacatatcaagtgtttgaaagtgcctgaaatatgaccagcacttaacaaatgttagctattagtgtgattatatcattgaaatctctcgtgagctctggatatagagagtattcttttatggaccaggaaactgaggctcagagaggctaaataaataccttgcctagaattacactaacagcagtcaacagaggtagagctctggtcctatctgaataggtctaaagcttgcaccatgttgtcaccagtgtgagagcatctgccttctacctgccaggcctctggtgaaattgygaagtctcacctgggccttctactctgctggctctgtctcctgtcaagatagtcacttagcaatatgaggttgtgcattcccctgttgacatactgatgaaagcacaagttaggtgcttatttaattgattctggccctgttgatccttgaactgtggttgtgtgtggaggtgttttgttccagccttccccacatgcaaccatgaggactcggggtggggaggggctccttctgcagttagtgctaaactaacatctttctctctggtctcacatgacatgctgaggtttgctcagctcccaggtaaagggaatatgaggaaggtatgagggtgacttggagattggatggcacatccagtgtgggtttgctgggaggctttgtaggaaggaaagaatttcaggaaataagcctgttagcctaatggtttcatttcttgaatttaaaaaatatataataatacaaagcaacaaaataattcaaagtagtagccactaccatccagccatgtcctgcctcatgtactcatagcccttgtccacagcacagatcttttcccgtcagtgtagtcatggagtacatataacttcagattctgactactcaacaatgtgtcataggtgctttcacaagtatttctaaagtagccatcagaatgagaatccccaagtgtcccagtctgaagacaagattgcagcactcagactccatgctgctcctgacaggggctgtgtctgctactcccagtcaccttgagcaaagaagagtgctcattattaaacactcattgaaaactcatcattttgatttctgtttgcattgatcgcccacccagtttttctaaataagttaccatttgatccaggactataactgagctgaggtttctctgagaccacccatgcccaacccagctgcccatcgaactggagccccaactctgcccatgtccacagcctggaccagcttccacctcttctccctccagcgtacgcctggtggatgacttgcaggaatgtgcttctggctggaaagagcagccagtagggctgcagtctgggagagactgcaaggtagagagctggatatagagttgaaacttatatctatatcagttagatatagattatatctgtatcagttagatatagattatatctgtatcagttagatatagattatatctataccagttagatatagattatatctatatcagttagataaagattatatctatatctataaacagctgatatagagtccagcagcaaggactcaaccaggcagcatggctcatgctcagggcttggcttggttttgcagaaaatttggcattaggcacaatctgatggcagagattggagaaaaataagaaataggccactaatgggatttgcctgtgttctttggaatatttgaatggatgctgttaaagacttgtgttgatgcttaatgagcctgcagagagttggtgagggaaggatgaaaactatgagaaataggttgagccaataaagggagccacgttatctagggaacgaagagggtcactccagcctcatgattgagagacagttcttctggggaccaggggctcttcaatgaggccagtcttctcccaagcagcttgggaaaggagagatttggcaggcagaagggctgcctttatgaccttgaaaaagtagctgtccctctgtgagccccaggcccctcatctgcagcgtctgagggctggaccagaggttctgttcatgttcagctctgtcaggaacaagccgagctgtggcaacccccagagacagggtgcagctacagtgtgcacagggacgacccctcctctgggcatctctcccctcatgtgtgtctgttccctgtctctctagctctttaccaaacctcacccagccaggactgcagcagggaagcctctgcctggaaaggatgtctccacccccgtgagcctgcctggccacccacagccctttttctacagcctgcagtcgctgaggccctcccaggtcacggtcaaaggtgattccctggccatgcattgtttggtgtcctgtcccagggttgtcccttcagtggctgggttcctctggaggtccagcaccacatacctgggcaaagtattggggactgactttgaatggctgcatctccagtcacagccagattctaggggggtgtcatctctgggaagtgtctaggagctcctctgttagaccctaacttctgaagacccacgtctctctgtctttctgtctgtctctctcacacacatacacacacagacacctctttcaggcacacacacacatctctcttcctcttcctctcttttatacatgcacacacacatgtacacacacataccttctctcctcaagagaccagtggagagtcccaagtttcacaaggaaggattacagcctctgtgctttggccactggtcctcctaagcagggcaggggactaagctaagcactctaagcaggcagccagtagctaagaacatgtgctctggggcagatggcccaggagtgcattccagtcctactgcttcctgactgtgtgaccttgggcaagccattgaacctccttgttcccacggggattggaatagcattgaatggatgctactacagatttgtattgatgcttagataaatgagcctgcagagagttggtgaggaaaagatgaaaaacatgagaaataggttgagccagtgaagggagccatgtgatttagggagggaagagggtcactctggccctattattgagaaacagttcttccagggaccaggggctcctcaacaaggccagtcagcaagagcgcaatgagatgggccaccttcggtgcccagcacatagtggtgattattagtccatctcttctgaccataattcagtggcttccttggctgccaccaaggctcagagaggctctatagaagcaggagtccactggggtgggggtggttccactggggtgggggtggtcccaaccagcccaggagggaggatctcccagatggaagcagaagagagggtgaggctgggttcctagggccatgtatgtatgaagtcgggtgccagtgtcatctgaggacatgcactgccttggggacatcccactacactgaacaacatgcaggtcccaaggagtatgaagttaagttttcaatggttttagtggtgtccttttttatccttgaagtccaagaacagtgtcattggcacaccccaccctggtagataaggtgctactgctcttggctctggggaccatgcctccatttgccccaggactggggatccgctgctgcattgaagtccctgggcagtcaggcacagcccctgccctcatggaaagggacatgaggtgcaaaccacatcaacagtaacaagggagctcaaatctcccatgtgggctccaggagactgatgcagatcttaccagccacgggtcctggggatccttcctgaggctcagtttcttcatgtgtaaggtatggaagacaatggccctgccctcaggcttgtgacagtgccatgaagtggtgtctgtcacacaggcaggcaacaagccagcgctgaggcaggagtcctggcagatgctggtgccactccgagcacacacactgggccttgctttaaggggcctggctttactctctccctttgatctgagcagccccagaaggtaagggccattgatgccacagtcccttccctatggggagagacatctcacagtcttatcctggagcctttcctgaatcctgctccctctcttcctcctgggtggtagggtcaggaagagggtggttctcccacttcacccagcacagggcaaggaagggagtggcccccaccaggaggaaggaaaggcccctacgtggtgggtatggtgtgcacagtcttagaaactaggctggcctcagtgttttgagtcaacaagctgcaccaggctctgtgccaggggacacacattgaaaggggcatggttttctctactccatgggaagaggctagggtctgaagagatggaatgacttcaccagcatawccagacttggaatgaggtctgggcagctccaaatcccgtgctgtgagccatattccagctggggctgggggtggctcccagagtggagctgagggaggatgggaattgtgcctccctgtgactcctgccccggggcccggctacagtgggtgctgtccttctgtgcataagttcaagtccagtgtgtctgcctgtcactcctgcccagggcccagctgcagtgggtgctgtccttccatgcttaagttcaagtccagtgtgtctgcctgtgactcctgcctgggggcccagctgtagtgggtgctgttcttccatgcataagttcgccatactaactggggtgtagatatgtacctcttttctctaggctcagagtcccccaaaggggccattggccacattgtctctactgagaagaccattctggctgtagagaggaacaaagtgctgctgcctcctctctggaacaggaccttcagytggggctttgatgacttcagctgctgcttggggagctacggctcygacaaggtgagggggctgcagggagcaggggcagcctcaggacctcagccttcctccagctggaggcagagatggcccagagataagtgagtccaaagcaacctcgctcactttccctacaaggtgtgctgccagcctgggcgggaaaggactcagtgaccatgcaaaggccctccttgggccgggcctcaaaccctccttccaaggcttgcaagttggcagtgtatactgtcacctccagagcagaggctaactggacacatggccacattgagcccacccacactggcactaagtgtaggagggaagtcctgggggctcctctgtttccaatcatgatttaaactcaaaggacacatgttgagcatttgggggctggcaggagcaagctgtttccctactggtcctcccagcccccgtgtaggccatgcagtcacctctgccttcttgatgtggcccctgccctcctcctcaggccccattcctactccagctcccctccccaatcccatcacttacaatgaattccctatcccccaagctctccccagcccctccctagccttgccccaccaacttcttgaggcaggcatggaactcagccccacatgtcctccctcctgacccccaagctaagccaccccgtgctggtgctcatggggtcttcccagcatccctcacttgtttcttcccacctgctggaggaggagctcctgcgtggggtcccaggatggtctggattttgtcaccaagaactggctcctgaacacatggcatgtccccagttcccaaggcactcagactggcccacatacccccgtgactctatcctgggctccygtccctgctgtctccacagcagcgctcatcccccttatctcctacaggtcctgatgacattcgagaacctggctgcctggggccgctgtctgtgcgccgtgtgcccatccccaacaacgatygtcacctctgggaccagcactgtggtgtgtgtgtgggagctcagcatgaccaaaggccgcccgaggggcttgcgcctccggcaggtatggtccagctcgtgcaggtgcggtcctcaggtggggacastacttcatgtagggacaaaacctctgcctggcatggcacctgggcaggtgtggtgccggaacacaccctaactctgctcactgagggccctgccaccctcagaagctrggaatgagcgaagtgaggtgcagagggtggcccacagctcagtgtcattcaggagtatcattttattcccatggtgcatttgacaggtacacagggcaggtgcctccacagaggcccacaccttagcgagagatgccgggccacacacagtcacttcatgcacatgacaggtctggtgaaatcagtttccttacatcagataatattttttgagcattttgccacaagttggcctttatgccaaggatttttacacggattgcctcattttagcttattgacagccctgtaaaataggtgccatgatcacccctactttattggtgaaggaaaaatgagatgcaaagaagtttaagtggtacatccaaggtcaaatgaaagactttctgaaaggaagtggttgaggtgggaggaggaggagccatgagccaggagtctgaggatgtgcaccaccagccctcatagagaatgctaatcgcagcggcacttaacgtttgcttaacattccaaatgcaccaaggcccttctgtatactaatttttttctatgaagaaggaactattatttccactttcagacaaggaaactgaggctcagaacagcttgcatttgaatctaggtttgtctaacacaaaaccccatgcgctctccctgcatactccggaacttgctctagaatatcactaggggacactttcaactctaaaatccaattcatttctgcatctattttttagttagccacagagccctaaagtaatagaaacaaaaataagctgtacaaaatcactcacgcctgtaataccagcactttgagaggctgaggtgggcggatcacgaggtcaggagatcgagaccatcctggctaatacggtgaaactctgtctctactaaaaatacaacagattagccaggcgtggtggtgggtgcctgtagtcccatctactcaggagactgaggcaggagaatggcgtgaacccgggaggcggagcttgcagtgagcagagattgcgccactacactccagcctgggtgacagagcgagactctgtctcaaaaaaaaaaaaaattcaccactgaccaaatttactaaactgaacatgtttcactgaaacatgttctctggataattttcactgaaacatgtttcactgaaacatgttctctggggttctctggataattttcaagccacttctgtcaccctagaccgtgtccttgtctcctggtgccatgcagggcatggagggtgctgcgtgggcactcagcaaatgtgaggtgaaggaatgaatagggcagtgcgagaaggggctgacacatatgcaggggcagtgcacccctgagaggcagctgtacaggcaacaggcaggtgaccttcaccaactgctgttgtcagtgggctgggtatgattcctgatctcagcaaagggactggaaatgaaagactggagtgctctctccccagcatccccattgcccatttacagcttgccctggggactgtacatagttccacctgaccctggggctggccttggggtactggggcagtgatttttctatcatcctctgagttcccatttaacagtgaaaatgcacagaaacaccctcgtatcgacctcataaaaatgtaatttatcatcctctcctacttccaaatcaacaggaaaagatatgggaatcccacatgctcttattttctaaaaataaaacactttatcacttacctgtaaaggctaatgtaggcttgcagattccccagacccatggctgctcagtgaaggggtccattcctgacctgtggacaggaaagtcatcactgaagagcctcacaggcggttcaaaaagtattttatttttaaagatactgcaacgttaaagagacattttaaaattacttcaaagacaaacaattctctaccatccctataaaagttttcaattttgcatactcttatccccagatatacatatttatatctttctgatcattgtgtagatattttattctattttcactcagcctatccaattgtttccatttttctacattctctataatttacatttcaatcgttccatatcattccatttccataaaattgcatttcgattgttttgttatgtcagtgcactacagtttaataaaccatttcttctaaaactagacaattaagttgtttccaagttttaactattttacatagtgctgcagaaaacatcttatctaggttgctgtttgcttctgattgttttcttgcgataaacttcgaggaggagaattatgtacagtgacatggtgctttccaaaatggttctgtgacttaatcataccaccagcaatcaagagcacccgtttcatggcaatgtaaccagcatggggaattattttccggggttttctttttgctatcgttttttgctactatagttaggtataaaatgatataatggagttattttaattggccttttagagaagtattattctgagaaaacaaaaccccctttgaagctgctatctcttccttgatttcttcggctcttgcaaatggtaggtgctggatgccttgtggtgctggagtctccaggctggtcggaaggcagccaacctgacctaagtgggcagtgccaggcacacaggctgtttcctgggaagagcaggcagacttggttccactggtaaacaacacgtgccggcactggggctcagagctcctctctacatcctgagccttacacctgggttcccttctctgttctctttggcattgctatttcccctgcagtcagaactgagtcatcagacttagttcattctgggaagagattcagaaggttcctgtcaactcctctgctttctcctgctcacttaggcmgttttcattttcctaggatgacccaaatcttcttctgtgggtcatacccattaacttgccggcaccatctggttggcgtcaygttaggatccattaaggacaaacaggagcttgtggcagaacctttcattgctatgaccgggcaaagtgacagctttgaaaaatgacgcttagcctcattgacccaaatgaatgagtgattgtctctgccctgagggtggaggtttaccacttggtaagccaggccaattacgcttcagaatgccacctccgtgcccctccggctgagtccaggtgatggcaagcacatgtgagcagaggacctcagatcagagcctctgggacctgcagcctctggagtgctggtgatggaatccacaccattgcctgcagcagttggccagggggtaccagcatgtgtggtgggccactttggccccttggggaagtgtccacagagaagaaggcctccagccagatctggacacacagccatccatgagtcagaccaggccccacacaagccaaacctgaggaccaagaccaaggacgtctaagtgtcccagtggctatgaatccagacctatcagactcgaaaagccccatctttttgatgaccatgtgacctccccttttcttcttcccagtttagttcaagagtgcacgtgcctctgaggttcccttaccgagatggctctcaaagttgggcacatgtgagaatcccctgagggcttgtgaaaattcagacttcagggccccatccccagcgtttctgattcaggagatttggagtggaacccaagaatttgcattctaagaggctacttgctgctactgagcctgctggtgtgggcaccacagtttgccaacagtgctttgtatgttaatcgtaacatgaactggccaggtgtgatggctcacacctgtaaacccagcactttgggaggccaaggcaggtggatcacttgaggtcaggagttcaagaccagcctggctaacttggtgaaaccccatctccactaaaaataaaaaacattcgccaggcatggtggcaggcacctgtaatcccagctacttgggaggctgatgcaaaagaattgctgtacctgggaagcaaaggctgcagtgaactgagatcatgccattgcactccagcctaggcaacagagcaagactccgtctcaaaaaaaaaaaaaaaaaaaaaaaaaaacaactcatgacatgaactgctcccgggttcaagatagatgtagggcagcacaaaacatccaggtgtggctagcctctggttgggttataagtaaaaaaatggtttctccccagcagagcctccacccctggagatgaatgaaatggagaggctagtcatggacacgcacatgcacacacccccagctgcacagacaacagacttgggaatcactgactcactcagaatctccatttcctcatccagcacccagctttatagggagggtgaagaattcccaaaagtagctgaattgagggtccctctcctaacctgtgagtctctgtccccaggccttgtatggacacacacaggctgtcacgtgcctggcagcgtcagtcaccttcagcctcctggtgagcggctcccaggactgcacctgtatcctgtgggatctggaccacctcacccacgtgacccgcctgcccrcccatcgggaaggcatctcagccatcaccatcagtgacgtctcagtaagtctcctgtttctcagtgtcygtgtcctcaccttcgcagtagcatggggtacaacactcaggagaaagcccagagacacagagactctagccaccccagaatgctgagagggcccccarttgtgtggaacagtcgctgtagatctcacttgtagcacccaggtctagcttcaatgtccgcttctttactttcctccctctggtgttggggacagtgggaagtgtctgctttgctgcgggcaccagggggctgcagctgaaaaattggcttttagggagggttttgttggatgtggctgactcatttaggtctttaccttcaaatcagtgttgacttggcaggtttggtcttcatggcagtgcaagcttctctgcctctccttccatactggctaacaaagaccagggagatcgacttaccggtgtgaaatttcttccagactgaagccctgtcatgggatatggggttccctgaggatgcagaggtttctgcatctgctcacagaaaacctaaggggcccagggcataaataaaatgggcagagggctcaaaagaggagggatgatataggagcttcctggttccaatttttgctgaaagtggtgctccaggtaggcttgaattcaaaactggattcaatgttagaygagtagatggagtgtgaatggatgggtggatggatgggtagatgagtggatgcatgggtggatgaatggatagatggatggacgggtggatagatgagtggatgggtagatagataaatgaatggatggatggatggataaatgagcagataaatggatgaataggtggatggaaagatggatgaaatggataatggattggtagatggtgggtgaatggatggatgggttgatgtatagaaggcattgaagccttcacctgggagaatataaaacccatcaggaattgtgtccctagaccccagagaagcctggcaccaggacaagttgtcctgcagccaactgatttcagtctgtgcttgctggttgtggggcagagaggtatcagacatggcctctggcctcagacagaccatccctaacaattcaggaacttctaatggatcccagcccagtgagatgtggaggggcactgagcaccctacatcccttctgtgattagggcaaggctcaaagggatggccccaggaccttggtgacagtggccactatagaataaacaggacttgaggaggaaagactcaaatgtgagcatatcaggagatacaatggggaaatttctccttagaaattccctcttcagggacattgcacaagcttatgagccacatgcagtcattggaacttctgtaccctgccatccaccaggtggcatccaaaacttctttatggggcagggctgaccwaccaggtgtaagctgtgtgtccaaagccagggctacccttcaggctggatcttckgtggcagtcagggtgtggttggggagtgggatctgggaggagcctgagggtgagccaggtgccttctgccaggaaagaagtatctaagcacatgactgcagtatgaaaagaaccaagaatttacaactgtgtgaaaacacagcagacctgtaagtcagctggaaagaagttttggggtaccttgggggtcttcagagcatgacagattgagrgtacttgggtgtaccaactgggtagctgagcaagtggctgatgggcaggcagtgactccagcttagagtgatgccagctctcactgcacagggcaccattgtctcctgtgcgggagcacacttgtccctgtggaatgtcaatggacagcccctggccagcatcaccacagcctggggcccagaaggagccataacctgytgctgcctgatggagggcccagcatgggacacaagccagatcatcatcaccgggagtcaagacggcatggtccgggtaggtgtgtcttgggcagaatgaggacatgacacaagaaacgtgttcatctccattcttctcacttcctccagggggccaaacctgcaggttgcatttgagaccattccagaacgggtacctacagcaaaggaagggaaaagacaaggctctttgcagggaaaaagtaaataaataaaattatatatatagtattacacacacagacacacacatgcacacacacacagacacacactaaaataaatactgttacaacatataaaagttgaatggttaaatgcaaaagattatatcccaatgctaaaaggagatatttgcgtcatccattcaaaccaaacttgcccacccatccactaatttatctacccacctacccatttatctctctactcatctacccacccatccatccacccatccatctctctatccacccatccactcatccatccatccatccatccatccatccatccatccatccatgtatccctccatgtatccatccatccatccatccatgcaggctgaggtacctaggcagtcccctcataggactttatctgtggcctctgcagaaagcagggcatcctgggatggcctgggcttggtggggtgtggcccacatcagtgggccagccagaggagcctggggtggccgagctgcagagtatattactctcctgggcccccccaaagcgtaagtgagggtcttctgtgcactcagcactcattcattcgatgtggtcactgagctcctggactggcccagtgctgtgctaagcctggcgtggggctcacagaagcatttgagaggaggctggtccttgccctttggtgatataaaatccagacccagtgaatgagaagccattttgagtgagttggcctcagggctcccacagtaggcttagcgccaagggccagacacaagatgggggtgcccagccacccaggggtgagggagtactctagaggtggtagcattatgggcaagagggcattggttgagcaaaatggcaataaactggttgcagagtcacatccctgcaagaaaagggctgtgggggtcatgagatgcacttagggacaygggtggggtaaattcattcaaggtgcaactgtgattggccaaacctctgcatgaggaagctgaaggctaaataaccttttacctgatgataagttaacatcagaagtgaaaggggggccatgtgttcatcctttccctgggggacccctaggcgtgaggaaatggactaggccactccaagcttgcagacaggatcrtcttccccgccgatgacatttgctcttttggggcaggtttggaagactgaggatgtgaagatgtctgytcctggacggccagcaggagaggagccccyggctcagcctccaagcccaagaggtacctgacctgctagggatgtggccgtcctggccttgccctgccctcctcacctcccctctctccacctcagcccaagggctgcagctcctcccaggtctgcccagcctagggaggcctaggaaggcacagagaggttcagtgacttgcccaaagtcacccagcaagcagactatcctcacacctgctgccatcacagccacaacggcctcagaataacctaaccatagacactggcatgtaaccaccatcaccaacccctccataatgaacacaggtacaaacctccccatcaaagctgttaccgcatcacatccatcacagctgtccagtccccgcccccatcattacctcctccagctcagtcttcagaaaagattctggccgagaactgggacatctttactgggacccacaatcaaacatgttttcatgaagttagaattctatcatcctgagtgcttccattagctccctgtttgctctgcatcccagaacctgtgatcatccataggagagaatttcccagatttctgagggctgccttctgaaaagagtagacatttgcaattagttcatttctaaaacacagtccacacctctttgattcatttagtcacccatttgtggattcttcttcaggcaagtacacacaggcatttgctcagcctctactgtgtcctaggctctatattagtggtcccttccttcaagataacacctggggacccttgtaaacaatctgggctgagccaaggcaataacrtcacaaagatcaataatatcacaaagatgcagatcaagaactccgtcagttcacaggttctgtttctctagggtacttggagaccaccacaaggagtcagcctatctcagtgtgaaaggacagaagtgtgtgcattctaaggaacccagcacatctttggaaagcagaggccaaactccctcccatatctgcttccacttggaaaggctcttattccccagcctgcttacaaagcagttttctgctatacctgcatgagactgcacaccattttagttttgggctcaaatgcccacttttgaagctattggggcccagtaagctaacggcattagctaagcctacggttgatgaayggwtgtctgagaaagaatgctggatggatgggtaaatggatggatggatggaaggatggatggatggatggatggatggatggatggatggatggatggatggacgggtggatggatggatggatgggtggatggatggatgaatggatgaatgaaagtcacctcagagccattcagttgattctggcagtgccattggatttgcaggttcctattcagcatcaatggttgtggtgaggttgcactcactggtcatggggtctagtgaatgagaagcagagtaaaaagcaggaaacaaggttctagacccaactctgtcacagcagcttctctggtcttctgtcaaatggggacacttcctgtgcatcctaactagtagagtactgatgacagaataatagtagccacagacaagaatctaccccaaatgcaggtcattattgtcatttttgcaggctttgagagatttttctctctggacacagcagctgatggcattaggaaacttacttaagggggtcttagactgacagggagccccagatccacaaccttcctctctgtctgccctgaccctaagtctctgccaccccattggactgactgccaagattgtgattacagttcaagggaagattaacatgaaatgacaggatgacatggacatattcaaataatcacactggcctgcagtttagagttaacaaatctaaaatatgtgcagatttacaagcctaaactgctggaggtctctaataaaaaggcatgttgttcttwyattgctcaaaactgctttgttggaaagggacctgtattgggcatggcacgtggatatttgcatgtgtgtcctcttggcgtgtatrttactatacccctcaaatgtcttaaggggcaagaaaggagatctttgaagatattaagcatactgcatttgtgggcagatgtaatccaatttctgcttggaattcatttatttgccatttgcagcaaggcccaacccagctgagtacaatttatttcaggaatcgcctcaaagatttggactcaatctggtacataaaaagtgcttgggagaagcttgttgtttagacttgtacacaatgtacaaatgcctggtgtgctttgaggtggtttctcccacctggacccctcatgcatttcctggcacatggcctgtctgcacacatgggtggtcacctcaggacagcaggggctgtatcatctctcctgccctgagtccaaggaagtggcctcgcagggacgtacccagctggcgtctctccatctcacccttcacattgaaggaattactgtctgtccccaaatgcagtcattaaaatgagtgaagtaacaatcattgagttatattttttgaaaaaaacattctcagcatttaattaytgrttgtggcgtgagaggattaagataagttgataatgccgactttatgtaatttatttttactaggcaattactggctgcattacaccctggcagcaaggtattgtggggcatcttattaagcataaagccagtaaacactgatgaacaattttgctgaactaggcatgcaatttagaaagcaataatacacaaatccaatttggtacacaatggataccgaggcacgtcagcacatgtaactatcaccgcctgcaaattaaattgggacggccctttttgcaacagcacaggccaagattaaatatatttccccctcaatttaacaagttgctgaccacaaatataaatatgtgcgtatgtgtttgcggccccgtgtgcagatgcacactgtatgtgcgaagccgatctggcgttctaactcttctctcacatgctccacacaggccacaagtgggagaagaacctggccttgagtcgagagctggacgttagcattgctttgacagggaagcccagcaaaaccagccccgcagtgactgctctggccgtgtccaggtaagcgcggccttgtttctctgggtctccagcagagggcactgcagccacctttaggaaagccccagtggctctgagtccaggccacctggccgaggaggccacttcactccaggacatggccccaccaagcacaggaagcagcccgtgtggccatatagagccccaggaaacgtttttcagggttttgttgttgtttgttttgcttttaactcacacatgcccttgctctcttgctcttgaatatccaaacattcattaagaaatccaagaggtataagtatattgttttgtaattttatcctaaagagagccttttcccctgagttccactgcagactgtaacatttggtgtgatgattatccttcattaacagaaagtgccttctgagggctcttagctgctgtagcatagccaagcatcattcccgacacttcatacccgttatttgactcgcagtaacccatggaggtggttactgtcattaacatccttgtacacactgcgaggtgcagccttaggggccgctgaccttgcagagccggacttccttcctccctcactggcgtggcgtgggctgttccggggtccttggtggaggcactacacagtgttttagatgctgggtggggcggagtggagtggggtgggcatgatggtagggccagagccgcactttttgcagagaacttgccatttgttctgccctggtcctggctatttctctggtgggacaggagactcacctggaggcactggagagaggcacggcctcgtcctgttccctggggcctgagcttccccacagtgctgtgggagccaccaccctcacagctcaatgctttcccctcccccaggtggaaaccttctccattcctcccactgcctcccctgyctcaagggagacaagaccaggggcaagctccgctgggccccagatagagccccagagttgcaatatcccatgtgctggcggggacaagtggtactgtccctctaacgttcttgtcttttctttctcttcccaagaaaccacaccaaactcctggttggtgatgagagggggagaatattctgctggtctgcagatgggtaggaagagagaggcagcagaggctctggcacaacagtgccaggctgagggtggcagaggtgactggggcctgagctctgcctacagaagaaacccccagggcctccttccccacagttctcaaggaagggcctctggcaatcacagctctgcagcccaaccctctccatggccgatgggayttctatgaaaaggatgagcacacacactcggagggctgagcagcacgctggaaactgtgacttggtgatgcccagctgcacacgaaattacacatgactcaccttattaagggctattgcactgaaaaaaaaaaaagatgggtcgcttactggaaattattgtattgtctttattttattaaagcaactatgttttaaatgcagaagggctcttcagttttaaactgccactctattccacttaccatgctgcctttctaagtatttgtgtttctgtcctgagaaaggcaggaaggcttcagggaagcacatccacctgcacagcctcacccagcccctccccatcttccaccttggacactggctcttccccgtcttgcccatagtgtaggggcctgaggagtgaggggctactgtgaagaaggcccagcctctgtggctgagccgcaggacatggcggtgggtgctgcccatggcagactcagggagtttggcctggggtgatacacccgccttggtgatactcccacccccatctccacaacctgcaacagacaaggattccagacaactcctggctcagcagtctcttcccagggccccggtccacacttggcttccgagctgcagttcttcctggagaaatctgcactgctgtgtgacttttgttttccacctgaaaatgtatggcaggtggggtagttactcgtgcccctctgaagaattccagtaccttcttgtgcctgggtcattctgggattggtcgttgggcatcacaggtatcaccctcactctaatgtctcctccttaccccaagatttgcagagctcctcaaaaggaaatccacctgcctttttaataaagtcaagctcaggtggacacatagggacttggggaggttaagcttgttagcttcaactagtctttcagagatctcccttctaggggccaggtggggatcctgatcttccccatgtctccaaactctgcaaaggccctgaagggggtccccacctaatttagcccaggcccagggatagcaggaacatgcacttcatgtcttatgccccatgggtcgtctggcctccagggggcaacaagttgattaaaagataaatattaagaaagtggaactggtgtgcagccatgtcaaaaatagtgagaggtggttagcataccttgattcctctgtaaactctgaggctttgcaaaggagaagatggaggagacccttctcaggtccggagcacccctccccgggtgagaagcacttgtgtctgaccccagagccaaggatcacaccacctcccacaccatctgcmcacactattagcagacagcccatttgcaatcccctggttggtctgggactgcactgaaggaccataaatttaagagcagagagcaccactccccaggaaggccaagaagcagggtcataaatatcaaggctgagcctgctggcatttttcaaaacacatcacagcattacccaaggctgacaaggtctgctagccaaaaggctgtcttcgattccttcatttaagtgtttttgccttttcttcccctcaaatcacggggaaaatgaggaggcagtgttgggtcttattggtggggtcctggtgatgtggtgtctgcaaacaaatgtgacttgaggtgaaagggctaaaaaggaaatctcaggccctagggaaggcaaaggggacactcagctatatcagttgggtggggctgccataacaatattaaacagaaattcatttcttcaaagttctggaggctggaagtccaagatcaaggtgtcacagggttggtttcttttgaggcctttctcttgctttgcagatgaccaccttctccctgcatcctcacctcatctgtcttctgtgcacatctgtgtcctcatctccacttataaggacgccagtcatatgggattagggtccacccatatgaccccatttcaactgtctccaagtacagtcacatttggaggtactgggggttaggatgtcaacatagaaccactccagggacagaattcagccacctatggcactggctgaaggaggtggccctggagccaggcctggaacctgctgagacagagggacggggttgcaggaagactgggctgcatcggccaaggtacagggtgagtccggctgggtgtgggaagaagaatggagggcacacgggatgaggctgagaggtagaggggctgctgctcctggctgtggagtagactctggtcactggatggagtgagtgcaagtgaggctggcagaggtgggctgcccacccgcagagcttcattctccatgccagctcccagaatgtgccccacaagagtcagctgagtaaacggacatgtagacgtatgaatgagtcttggtggcagacatgtcagaaagggtggtcctgggatggcagggtcaagcagcagcccctccgtgggcagggtgaagcaaaatggagtgaagaggtgggaataatgagaggaaactgtaaatgtcatgccctgggcccgggacatgtcaggggaagaagccaggagcttgggagcttgtggtgaaaccgtgaacgccgttgtcagaagctggaagctttagaggcatccatgaagcagggacgggctgtgggtgagaatgccccatggaggagctggggagactgcaggagacaggctccatgctgagctgctccagtggggtcctccaggattagctcgcattgctgggaggagggaagccgctctgcaccgaaacctgggagacacatgcacccttgggccctcacagacatggccctgctgtagactcccgaggcatcggaagcagagtccgctgctggaggcgagggcaggggagcagtcaagccaggatggggctgcagaggaaagcaccaggcacaactgaggcccaggctccaaaagctctgggcaactccagtgacaggaggcccctgctggcccgagtggactacgatgtctggccagcagggttggggctcctgacagttgtcagtggttgggggagcccagggcagaggcctggggtgcagggagaggagagaacaggctcagcacccaggcccacagcagaggcagcagaggtagccagggccgaagccaggggcacagcctgcctggggcccagaagcaggaccatgcagacactggcctcaccagcacaccaggtccagtggggaccgggggacccgtcccagtgccacatggtatctagaggcctagacaggaggacaggcatatgcggtgagtgggtaaggaggccaggccacctgagcaccaggcccagctccacaagtcccgccagccttggccacagcttctgtatctgtgaaatgggatcctggtgtctacctcagggctcctcaggaaagtaacatcatatcttcttattttataataaaataaaataatagtggatgaggcaaacaacagactgcctattccgctgtgacgcaagctcttggctgcttcactcaccagtgttttccttgctcagccagtccctgagccagggcgctggggatggaggaaccctgaacctgggacacagagaacatgggacagcaggctcaagacatttggcaggccccacgcccagggttaaccaggctggagcagggcaggcacgcttcaattgtgcttcttcagaaatgtctgggaaaggaggtccagctctcaggctcccccgggcccacagactttgtgcctgctcatggggaacagaagcctcaggctgcatatgtcaccatctcccagggagcacaggtcccggagtctccactctgttgggaggaactccagcactgacagcagcaggctggggtgaggatggaggcaggcgttgctgcccaccctgtggtctcgggacwgatggcctgtgaagggcttccccagcctctggggtcagaaacccccatatcccactcacttttcacgtctgagatcagctcctagacagcagccatgccccactctcccccagcagaagtcccctcacggaacacccaccttgggtctctctgcattttctacatcctctaagaggccagggaagggcagcccagagcaattgatgggcatccctcccacagcaggcacccaggaaagcagggatcccgatcgggcaccactgtgcttgcctgagaccagcatccaggcatgctggagtccctctgggagacgagttcacccacaaggggggccgcacgctcaagctgtgcccatctctccacctggacaggcctggccagactgggacatacttatgctaacaaagtagtcgttgctcatcggagattcaactttttccaggtgtcttgcatttgtgtttgctaagtctggccgtcctgctcccttgacctcttaggcgcaggaaggatggtgccttgtcagcaggcctggcagaacccataagtactcagtgtgtgacccatgaattgcttgtattcagtgaactgaaatgcaacagcagaagttcttggagggaccatgtgggactctctgtgccactgaccaagtttccagggctttctgtgtccctccatggcgacctcatgagaaccacatccccctaccccaggctggccttcttcttccattcctttgagctcagggatcctgggagagaagttctgtcccctggaagcccctgtgacagcaacttcctccccctctggggcctgcagagaactcaaagattggatttaaccacattaaaatgcagccaatcaggacacatacggggaggaataggctcttcatatgaaaatcctgatgaaatttgtttagcataaaatcaaatctctctaaactaaaatcagttttgctttagtaagttcttgggtacacatccacatcccatacctggatcagggtgtgtgtgtgtgtgcaagctcacgtgtgattgtgttgtttccaattgttctcttattggatgttgcctgaagcaccttcatgaccttcttagtaaacaggaagaccctccaaattgcgtccttcccctgagaccctgaaggctcaaagaacactgttgtatcctgagctaagatctctgtctgccccaaaactgcttgaaaactgccccacttgtccaagacattttactgccttttgccagaaatgcagcaccataaatacacaactctatgatgacttggaagtggaatgtgccaccaaatcatgcagcacacactttgcatccctgtggcctttgcccaggctttaagcaccgatggatcttcactaaaatcagtgtgatgatgttatcttaactatccatccaagcacttgttcattcattcattcatttatccactagtatttaacaaggattcactgcatacctgttcccagccaggcttggagcctgatggagagaggctgtctggacacatatgactgaaatgtaaccttcaagagtctctggccatcaggagacacacagaccctctaacactatcactttggacatgtggaagccagggtccagagaaagaaagggacttgtctaaggtcacatagcaggtcagtggcagaacctggtcaaggctccaggtttactccccacccccaaactgtagtaccaagtgcctaaggccttgtgttccttaggatgggccactggcataatgaaatccaaatagcctgcctctccctggagctttggatgtcaagaacagctggctctccccacctcaaaatgaagcacaaaggaagaaggaaaagttcatatgcttttgaaaaatagarcaaaatgcatcggaatctttgtgtcatagaggccagcttgaattcctcctgcaacaaggagctcactactacaggaagcagccccccgtgacagcaaggctcattcttgctgggagcacaggtcacgcaggcccctccatgaggcagcctcagcctcagagcccctcagggcagaggcttcctcctcctccttctcctcctcttgcagagatcaccaggaggccagttgctctcacagtcccctctgcggcacctccaggctcttggggytttgcacaccctcagcctcagctgtcttttcctatgcttattgttttataaaatagaagtaataattactgacttcataagttgcttggaaagttaaaatgacataactctgtgtcaagttcttagtacagagcaggagctcaggaggtaat

SEQ ID NO: 6793 - DNA, 13784 bp, Homo sapiens
aattgctggaatctgggaggtggaggctgcagtgagctgagattgtgccactgcaccacagcctgggtgacagagcaagattccatctcaggaaaaaaaaaaaaaaaagtattttcaaatcatctgactcctcctctctcccagtgcaatgactttaggcagcagtccccaacctttttggtaccagggactggtttgtggaagacagtttttccactgacccgggggaaatgattttgagatgattcaaacattacatttattgtgtactttattactatttttaaaaattattattattatttttagagacagagttttgctcttgttgcccaggctggagtgcaatggcgcaatcttggctcactgcagcctccgcctcccgggctcaagcaattctcctgcctcagcctcccaagtagctgggattacgggcatgtgccaccacgcctggctaattttgtatttttagtagagatggggtttctccatgttggtcaagctggtctcgaactcccgacctcaggtgatccaccacctcggcctcccaaagtgctgggattacaggcatgagccaccgcacccggcctgtgcactttatttctattattattacattataatatataatgaaataattatacatctcaccataatgtagaatcagtgggagccatgaacttgttttccgcaactagacggtcccatctgggggtgatgggagatagtgacagatcatcaggcattagattctcataaggagcacacagcctagatccctcgcatgcacagttcacgtaaggtagggttcaggatcctgtgagaatctaatgccgccgcggatctgacaggaggtggagctcaggctgtaatgccagtgatggggagcagctgtaaatacagatgaagcttcactcacttgcccactgctcacctcctgctatttggcctggttcctaacaggccacagacaggtactggtccgtggcctggggtttggggacttctgcattaggggaaccgttaggaggacttgctgacctcaggagtacccaaggtgcctttatctttgtgacctttgatctctcagggtcactaagatggagcaaggtaaagccaaggcccagagtggtgggcgggaggcagttcttccccaccgctcctcacctctctctgtctcctcccgtcccacccccaagtctgttcacacagcgagcctgcagttttcaaggtggcttgtcaaggacatctcctgacatgcacgttcacctcctgaccttgttcctgctgtaaatttgtgaattaagtggggacatagacatatgcagagactactggtggcagtactagccttgtatttcagtagaatatatttggttcatttccttcttcccagtctccctgagtgatggttccagaacccagctccctgcactccggttcttccaaggtggagaaattggggtgtaggcagctgatctgaacaagggctggtggcactgtattttccccctgggttgaacagtcaccgtgtcctgctcctcccactactgtggggccccagctgtggatccaagcctgccagggaagctgtccccactagggcttctcacccagccagccgccatctcaccccaaatgtcactgtcctgaccatctctgctgtctggccctgtaacctgtttccttctttctctaagttcccaccctctctgtccaatccacattatggcagctggtatcctccccgttctcttcactcaggcagtcacgaacgtcatctccaggaagtttcattttgcttccccttgcggcccctgccctttgtacccaaaacaaagagaggcagtcgactgtccctggcactgagtttgtgctgcctgggccctgcctctccgcctgcctcagagtgtgggctgcagaatgggcccggggagggagaccggatttctttgattctgagccccgtgttttccacgtgtgacatttctgaaatcaggacaggtctcagaatcaatggcacctccaatatgggagtcttccttttagtgtctgaaaatggcttttaggtgagaaaataaagtgataaggagagaatggtaagaggattgggcccctttcagcagttagccaggcttgtatgccacgggtcacagagagagttaattcccttcgaggtctgggtctgccaggatgaggaaaacctgtcgctaacccttacgggagctcacagtgcagtgaggggacagcccaggaccagcgcagtacaggggatgaggggtgagccgggccccataggaacctgtgtggccctgggagcctgtggatctgctccatcccgcccacactgactttcctcaccactcttatcagtcttaaaagaacacagcctgcagcagtacctttgcattcctccataggcaaagatttccaggaaaagcagaggaaacaatggtgtattcgctgccttctgccttggtctggtttattttaaaatctgagccttcagtaatggctgcctgggcccccggcccagccactgctcttggcgtgttggcctcctggcgggggcaacagaggcgctgtgaacgccacctgttaaccccgatggccctgcctgccccaccacagctggagttggccacggccaagaacgacatgaaccggcacctgcacgagtacatggagatgtgcagcatgaagcgcggcctggacgtgcagatggagacctgccgccggctcatcacccagtctggagaccggtaggcgcctcccctgggcatggggccttccagggggacacagcggggagaaaggttggaacacagccccagagaccctcaggcaatgactgggtcacatcttgctgtggggctgccctttgggagttacctggtggggctggcccagacccacagctctctcccttggcagttggatgagctatgtccattcatgacgggagggctgaaacctcccaaggccaccagctctggtggttcccctggttagaggcagtttaaaaactggcaaggaacagaagggttgtgggggcagatttttatctaaagtcagggccatgatttgtgcatttgaccctgtgtaagttacaccgcaacaagaaagtgaatttttaaaaatcacaaaaatactgcagatagacataaagccaaggccctagagtcagggtgctggaggctcagcagcttctctcctactgtgacttcagctatttctttttttttttttttttggctcactacaacctccgcctcccaggttcaagtgattatcttgcctcagcctccaaggcgcccgccaccacacctggctaatttttgcatttttagtagagatggggtttcaccatgttggccaggcttgccttgaactcctgacgtcgtgatccacccgcctctgcctcccaaagtgctggaattacaggcgtgagccatcatgcctgacctcagcctctgagttcccaagacacaggcggggcccatttccctgtcagggtgggtttggagagagttcagtccctgccgctccctcgccatcccgcggccccgccctcgcttccggtacttctcacgggctgccagagggtgaggcagcaggaggaggagtgccgtccgtcttcaggattcctgcctgccccaaggttgacaactggtgtttttttctagaaagtctcctgctttcactgcggtcccgcttagcgacccgccgccgccgccaagcgaggctgaggactccgatcgcgatgtctcatctgacagctccatgagatagagacctgcctcccccttgcacccgaggccctcgcagcagggagctcagcgaggcagagggtggggctgcacagaggggaacatcagctgcagctctgcaccaggccggyccctggggactggggcgctcctccctcaggctttctccctcagtcttggcttctccagggctctggggtgtctggagctaggcttggccctaccattctggggccatttccaccacagttggggctctcctgccttcacgcgtgggtgtctgctacttccccatctttaaaatgctgccagagcgattgcggcccctcaccttgtccacgtatcaggaatgtgaatgtgggacctttcctccatccctgttgtccggagccagctcactgtcttccacactggtgctaactggcccaggcactggagtggaatagaatgcagctggaggctacgcatggcctctgcagcacacgcagctggagagggcttctgtccctgtcagcggcagagggcgttggggctggccggggcaccttgtccctgctatggtccacatgctcacgctgtccacctgccaggtggagtgtatgtggctgtggccctccctcgtggaggtgccgtgctttaaagaggccttagtgcccgggatgggcacagtgttttgaagggaggtgggagctcttgctctcctggtcactgcagaatgacagagaaggtgaagctccatgcatgtgtgcgcgggtgtatgtgcgctcagggtctctgtttaagtatcagctaaagatgtgcttcctccgtgtctgtcatacactgagaccaacaggctacagtgtccctgattcttggaaaagcctggagaagctggggagatgcggttcacaatgcctcggtataggaggctgtgttgagctgacattcaaatggattctttaataataatgaaactggcgagtatttattgtgcactttggtgtcactgtctcaagcacttcctaatattcactagtttgaactctgaggtaggtactttttttttttttgagatggagtctcatactctgttgcctaggctggagtgcagtggtgtggtctcagctcactgcagcctctgcctccggggtgcaagcgattctcctgcttcagcatgcctgtagctgggactataggcatgtgccatgaagcctggctgatttttgtaattttagtagagacggagtttcaccatgttggccaggctggtctcaaactcctgacctcaggtgatacacccaccttggcctcccaaagtgctggggttacaggcgtgcgcgctctaccgaggtatgtacttttgtctccactaggtaagcacacgtgcaaagtgaggcccgggagtaactgcccaaagcaactgagccgttcagtggcagagccaggggtctggacctaggtcccagctacacgccttgcccctacccaagttcccctaaggacgatgatggaaataagtcaccctgacacatctcagttcatcttcctcaaaactatgcgaggtgggcatttttaccgatttttaaacattatatagtccttaccgccttgggcatggttttaggtacttggtttacctagatgaatcctgcttgaagaccttaggggctggccacgatgtcctcagataagacacgagggcacagaaagcaatagagcacgtgctcaagacctcacagctgcggaggccaagctggaattgcccgctgcagctcagctccaggctgagctccactaaccagtcagcgtcagagcccagtgcgagccctgacttcctccacctgtcagcctccctggggctgcccacagaatagcttcttccatgtttggccaacagcagatagcctaggactggagcgaggagaggaaaaggccttgttctctgaagtagtggtgccagcttcctgtagcactcaagacgtctgagcgggaagcaaatggttctcgaagcaagcaaggctgtttggaggccctaccctcagtctgaggagaacataccaggtccctccccagcaagaatgtctcaccttgacacaagcccagcttccctcccctctgccccagaccctagaataagacaggacaagtaactggttgagcacagggtactttattgatggtacatgacaaggtgcggctccctaggcccctcccctcttcaaggggtctacatggcaactgtgaggaggggagattcagtgtggtgggggactgagtgtggcagggactccccagcagtgagggtctctctcttcctcttgtgctcttgctggggctggtggtccargggtcttactccttggaggccatgtgggcmatgaggtccaycaccctgttgctgtagccaaattcgttgtcatacctagaagatgaaaagagttgtcagggccctttttctgagccagccaccagagggcgccagaccctgcactttttaagagccagtctctggccccagccacataccaggaaatgagcttgacaaagtggtcgttgagggcaatgccagccccagcgtcraagrtggaggagtgggtgtcgctgttgaagtmagaggagaccacctggtgctcagtgtagcccargaygcccttgarggggccctccgacgcctgcttcaccaccttcttgatgtcatcatatttggcaggkttttctagacggcaggtcaggtccaccactgacacgttggcagtggggacacggaaggccatgccagtgagcttcccgttcagctcagggatgaccttgcccacagccttggcagcgccagtagaggcagggatgatgttctggagagccccgcggccatcacgccacagtttcccggaggggccatccacagtcttctgggtggcagtgatggcatggactgtggtctgcaaaaggagtgaggccctgcagcgtactccccacatcacccctctacctccctccccaccttgaaaggaaattatgggaaagccagtccccagaacccccaaccccagggttgcacgcagccccggcagggaggagccagtcttggatgagaaaggtgggagcctcagtcccattccccagctctcataccatgagtccttccacgataccaaagttgtcatggatgaccttggccaggggtgctaagcagttggtggtgcaggaggcattgctgcaaagaaagagggagcggggcgcaagtcaggggagcgtgtccatagggtgccaggctggccgcttctccacgggccctgccttcctcacctgatgatcttgaggctgttgtcatacttctcatggttcacacccatgacgaacatgggggcrtcagcagagggggcagagatgatgacccttttggctcccccctgcaaatgagcctacagcagagaagcagacagttatgaacccggstcctgcctttgcagggctgagtcagcttcccctcccgcgggccctcctgcactcaccccagccttctccatggtggtgaagacgccagtggactccacgacgtactcagcgccagcatcgccccacttgattttggagggatctcgcctatgggggtgggggggagatggggacaggaccatattgagggacacaaggttaccatatacccaagggagccacaccatcctagttgcctccccaaagcacatttcttccattctgtcttccactcactcctggaagatggtgatgggatttccattgatgacaagcttcccgttctcagccttgacggtgccatggaatttgccatgggtggaatcatattggaacatgtaaacctgggggaatacgtgagggtatgaaggggctgcccatcagccaggtggctcctcccacaccagctttggggctcaccatgtagcactcaccatgtagttgaggtcaatgaaggggtcattgatggcaacaatatccactttaccagagttaaaagcagccctggtgaccaggcgcccaatacgaccaaatctaagagacaagaggcaagaaggcatgaggaggggaggctcctccagaatatgtgagcagccctaggccacctccccattaagagggcgaatgcagcatctccttacccccaggagggcccaagaggttgaattttatctcccttgagcttccctgccaggctggcctggcttaaggcatggctgcaactgaaggctccagggctgcccaacacccccagtcatacgaagcccttccaggagaagcggccatgtggggcactgccacccacagtctgggcacaagctttgtacatggtattcaccaccccactatgccaccccaggaatgcttgctgctgcctagctcagctgcaccctttagggagaaaacgcttgtacactcagcatcatcaaactcaaagggcaggagtaaaggtcagaaattaactggacagggcaagcccaccccttctctaagtccctcctacaaaagggacagagactggggcgggtgggaagaggggaagctgtattttaaccccctagtcccagggctttgatttgccaagttgcctgtccttcctagctcttttccagaaatcaggagtgggagcacaggtaagtgcatgtgtgtggggagaagggatgggagagagccccagcccaggcccccagctacagaaaggtcagcagctatatttaacctcagaccagggtgcggtgggagatctggtttccggaagacggaatggggagaagggcaggttccccgaggcgcccagacacccaatcctcccggtgacatttacagcctggcctttggggtcgggtcaacgctaggctggcaggggaagggcggggccgtgaggtgagccggcgctgcaggaaggggccaccrccagaggggccattttgcggtggaaatgtccttttccaactacccatgactcagcttctcccggcttggcaccatgccacagccaccacacctctgcggggaggggacacaagaggacctccataaacccacttctttgatttaccagagaataatctaggaaaagcatcacccggaggagaaatcgggccagctagcctcgctccacctgacttccccgccacacgcgactccacccatcgaggcaggagcgcagggttagtcaccggcaggctttcctaacggctgcccattcatttccttcccggttgcaacatggcggccgctctaccgcaggcgcagcatccggacagggatgcacccgctgcgcactagcatcccggggcctgcggtgccggaggccgtgggggaggggctcctctgcgacacgtgaccccgcagagcgcgaaaggaaagaaagcgtcccccacctaggggtccgggtcgggatctcgggcgggagtagggacctcctgtttctggggactaggggaaggaggctccgggcagatggcgccgcaagggcggagctgcacagggcgccacagcctgggtgcggggctccgccaggtccgagcgctgaccttgagctctccttgcggggaacagctaccctgcccccatacgactgcaaagacccggagcccgcaaggctcgtagacgcggttcgggggcggtcgcagcccagggccccccagccacccgcgaactcacccgttgactccgaccttcaccttccccatggtgtctgagcgatgtggctcggctgcgcggagggagagaacagtgagcgcctagtggccccggccgacacacacgcctcccctcccctcccccaccaggcctccatgcccagcccgcgccgcatcacgtcctccgcccgcccctgcaatgcggaggccgcccgggcccaccccgcagcggcgcgaacacatccggcctgcgcccgcccctgccgccttcaggccgtccctagcctcccgggtttctctccgcccgtcttcacctggcgacgcaaaagaagatgcggctgactgtcgaacaggaggagcagagagcgaagcgggaggctgcgggctcaatttatagaaaccgggggcgcggcggcaggcggtgactcggaccccgcctcccgccaggctcagccagtcccagcccaaggtcttgaggcctgagctacgtgcgcccgtaaaaccgctagtagccgggccctactttctccccgcttttttttttccgcagccgcctggttcaactgggcacgcaccgagcgtgtgggccccgacgtaggggggaagggactgagattggcccgatgggaggtgatcggtgctggttcccaggactggactgtgggcagcaggacactagggagtcaaggacggggacccttacacgcttggatgaaacaggaggactttgggaacgactgagatggggaattggagccggagcccagcaccgctcgcggctgcacgcggcctgccccctcccctttctttctttcaaaggctgagaggcgggaaagttggggaacttctcctcgaggctctgcggtagtgacaccggactgctcaggcaaaggcctaggaggggcccatgggcctcgggcgggggcccgtggttccttcccagcccccacttccccctccccatctcctggctcctggcatctctgggaccgaggcctgggctgggcactgggcactgggcactgggggcctggagaggaaggaggctcgggaggcggcttgagggggagggggaggtttctgcacggaaggtcacgatgtcctgcagccctgtagcctggacctgataattagggcagacaatcccggccctgtgtgcaccagcggctctctccgggctggggccccaggcggaggacaggatggctggtgggggcccagaggcctcccacaaaggcactcctggaaacctgtgggctgtgctgcctagggagagagacagtgtgcctttcattccatccagcctggggcgaagagcgggacgtgagggcggaagtccctccccgccctgggacgtgcaggcgagccaggagccagggactccctttcactggctgcgccgggggatattgagggcagggtgagtcaagaagagggaaaaagtgggaaaagaggtcttgggcacacggtgggaacaggtcccctgccccctcccacaggggatccattcttctggtaggagggcagagggccaggtttgtgagtgtgggatgggagggtgctgaacacttgtaaggaagggggtggggtggggtggccttggcccatcagcaggtgcatgggagggggatcccgggcctctttgctggcccagcataacctgacaccagccccctgcccttctagctaaaagccggttgctaagtttagcctgcctggtgataatctttgcttaaaaagcacccacaggactccagtccctgaccctgcctttctgggattgcctttcctgctgggacccagagccaggctgtgtcctcgtctggctgccactggcatggttggtgcgggcttttcacaatgaccacccagagcagagtagcaagagcaaggcaagaaggtccctaatggtgaaaggggtggggtgggggagtggaggaagccccacctctgactcagctattcctgcaaccaggaccgttaaccctttctcattgagagcattaagagcacctccatgctcctgcaccacccaagcgtgatcttcccctctgcctcatgcttgtcatttttcattactgtcttctccccgcaaagagggagctcagtgcccagggagcactactgacgtagtgtgctgttgtcatgacagcagaggcaccagtgtggtcacgacagccagctcacagcctccggttcgaaggtgactcagcagagaagacttgaggagctggagaggggtgcgcaggcttcagggggcagcccgcctgcagcatagctcacgccctctgcagacccgggaacaatgaggaatgctgggagacaggtcttgtctcctgcagagctggaggggatcatgatctgaacttccacgagcctgggccggtctgctgccaacctttggagatgggattagggaacacgagtgggggtggggtgaggcacacggcagaaagcaacccttggtctagagcaggttttctcaactgtgacgctattgacattgtgggccgtgtgattctttgttgaggggccatcctgtgcactgcaggatgttgagccacatccctggcctcttcccacaaatgctggtagcattcttcccctataggctatgacaacaaaacaggccccaggtgttgtcagatgtcctctggcagacaaaattgcccccggttcagaagcactgatctggagcctaggcactgcataattctccccagagaggctgtctggtcactgtgcagggtccagaggttgagaggggaaaggtggcagtgacggggcaggaagctcatctgccatcccgggacaggccctaggactctgggctcactcatctctctctgcactgataaccctctctctgctgcatgaaactgggctaatgtgaaagatgaaacaaagacaagcttaggaaaaaatgtctaaaagtatataaaaacatttattcattagaaaacaaggagattggcaaacatatattccaaagttgaagcagctcaacgcagttcagttaggctaatttaagagaaagccttgcattttaaagagcgtgtaggcattttttttttaatttgagatggaggttcgctattgttgcccaagctggagtgcaatggtgtgatttcggctcactacaacctccgcctctgggttcaggcgattctcctgcctcagcctcttgagtagctgggattacaggcgcacgccaatacgcccggctaattttttatttttagtagagatggggtttctccatgttggtcaggctggtctcgaactccctacctcaggttatccacccgccttggtatcgcaaagtgctgggattacaggcgtgagccacagtgcccggcctttttttttttttaaaaaaagagacagacaaatattttacaagggaaacagaattcgaattccaggtcaccctacaggataccctgcacagggaggacaggaacagacttcctaggatctgtgcctgcgagccgatgctctgagaatgggagttgttttcttgggtgtctcgtcttctgtcatctctgctgaaagatctatgcaaagaattaaaggaataagaaaaagctgagtcacaaagatggtgaaaaaatagatatcagagaacaagtgagacaatcccacaccgcacagaagaaataaaatccaagctgtacaggagaggcccttctgcggcagtggggcagagcatctacactcaggcccccgcagcaggtcctatggaaaccagccctctgcaccctagctgtgtgccttctcggccgggaacaggcgggagcatcataccttcctcactggactcatcacttgagaagacaactttgggtttctttttggaagctcgctgctgggtgtttggatgccgacgggtagtacggcggggctctggtgtgacaaagtcattgtctgaggctgtagaagccagaggctggtacctagaacctagaaaaggcaggaaaacgtgatttaaaaaagaagaagaaacaaatcactgcaggaggggagggcccagtctggtctcgcccgcacaggctgccttacgtaccastggatggtttcttggctgatggcgctctctggctacctgcttggccaatctcaagctccttgattccatccaaacctctggtatgacaggcccgaagcttctgctcaaattcatctattatagcctggagggagaaaaggagattcagagcaggcctgaaaacagttacttctgattaaaaagaaacaaggccatggaagacatggaggccttaaacgcacattactaagaagccaaggtgagaaggctccataccggatcattccaatgatacattctggaaaagacaaagtgatggcaacagtaaaaagatcaggggttgtg

SEQ ID NO: 6794 - DNA, 21347 bp, Homo sapiens
gcctctgtctctgttgtagacctgaaggctgaaattgacaagttggccactgagtatatgagtagtgcccgcagcctgagctccgaggaaaaattggcccttctcaaacagatccaggaagcctatggcaagtgcaaggaatttggtgacgacaaggtgcagcttgccatgcagacctatgagatggtatggccctgttcatggctccccacctacttcccatctaatcctcagggtcttagacccctccttcaactgtgttgggatctgtttggggtctgtgagatccataaactctgccttaacctattttctttaattggagatagttttgtacctctcctttctccttcctttccacccaggtggacaaacacattcggcggctggacacagacctggcccgttttgaggctgatctcaaggagaaacagattgagtcaagtgactatgacagctcttccagcaaaggcaaaaagagtgaggagggggcggggctgtgagaggtggggcgaggactgaaagggagaagaagtcagctcttcatctggtggggagtttggcaccaggttggaaagggggagagaagaggacttaacccatctttctgtctccctgccttctggctttctccctcttccctagaaggccggactcaaaaggagaagaaagctgctcgtgctcgttccaaagggaaaaactcggatgaagaagcccccaagactgcccagaagaagttaaagctcgtgcgcacgtgagtgattcagggagccctttgccggatgacatcctcttctctcccggtgccccactcccagcctgcaccgccccctgccgctttctatatgtctgcgccaagaactcttcttatcattttggtatctgctggagaagccacaaatcatttgccctaccaggatctcctgccacctctgaaagcctcaggctttagcttcccttcctgtagatgacactttctcttcctcttggcatgcagaagtcctgagtatgggatgccctcagtgacctttggcagtgtccacccctctgatgtgttggatatgcctgtggatcccaacgaacccacctattgcctttgtcaccaggtctcctatggagagatgattggctgtgacaaccctgatgtgagaaacattttgccttaggatggggggttgtgaggggcatgaagggagtgggtacaagagggaaaatcccacagttgagtactgggacttcagaatagaagaaagatgggctggacgtagtagctcttgcctgaaatcccagcactttgggaggctgaggcgggcagatcacgtgaggtcaggagtttgagaccagcctggccaacatagtgtaaccccttctctactaaaaatacaaaaattagctgagcatagtggcacacgactgtcatcccagctactcgggaggctgaggcgagaggcaggagaattgcttgaacctaggaggcagaggttgcagtgagctgagatcacgccaccacactctaacctgggcgacaagagcaagactctgtctcaaaaaaaaaaaaaaaaaaaaagcctgaaagcctggcgctgtggctcacgcctgtaatcccagcactttgggaggccaaggtgagcggatcacttgagatcaggagttcgagactggcctggccaacacggtgaaaccccgtctccactaaaaatacaaaaattagccaggcatgatagcctgtgcctgtaatctcagctgcttgggaggctgaggcaggagaatggcttgaactcgggaggcgggggttgcagtgagctgagatcatgtcattgcattccagcctgggcaacagagtgagactctgcctcaaaaagaaaaaaagaatagaaggaagatggtgggaactggttggccttgggacttccaagaattctccaaaaggatggagtaaaggacaggatgttcctaaggaatctggaggggctttctctccttcctctggcccttcctggcccctgactacttctttcttcctcttccagtgttccattgagtggttccattttgcctgtgtggggctgacaaccaagcctcgggggaaatggtaagtggcaggagttggagggtccctaagttgagtggtcaagggcattctccctttcactcacttttctctccccttctctgtttcaggttttgcccacgctgctcccaagaacggaagaagaaatagataagggccttggattccaacacagtttcttccacatcccctgacttgggctagtgggcagaggaatgcctrtgctggggccaggggttcagggaggagtggatggcacagtgctgtcatcccttctcctcccctctccccactcccggtgctgaggctgcatcagaccctggtagggaggggtgccgcagccactaacggtatgtgctctccttcagscctctcccttcggagggacgtggtcttgcccactgtccttttgcctccatgctgaggtcggtgctgtatttcagagggagggtccttttcattctccttgctttgtatttaaggactggggcatagcatgggggcagtcccccagacctcttcattccccctcctgtggtgagggctaggtgtgatcaacacttttcttctccattcccttcctgcttttttcatggtgggggatccaccaggtcatctaggctctggccctagttgaaggggcaccccttcctctgtgccaagaggattcatcctgggagagggggcaaggtggaatgcagataactcacatgtaaaaggaacttgggtaggtaaataaaagctatacatgttggcctgctgtgtttattgtagagacactgttttagtaaacatgctgagcattcattttgcgtcctctgggttggatgcratgtgagaggatggcatgccagaattaggacaygacatgaaaccagagtggtgcctctgtccgagaacttgtaagttctcaacttgggaaagacagaggtgctggagggtaggcctcagaccagggggtctccaaaactttgtaaatcatgcatcttttctccataaaacatctttcacttaatttccaataaatgatgtatttgtgctatacatacgtactgctatactatacattagcttgacttctttttttttttcctttgaggcgaagtctcactctgttgccaggctggagtgcagtggcgtgatcttggctcactgcagtctccgcctccgggttcaagtgattctcctgcctcagtcttacaagtagctgggactacaggcacatgctaccacgcccagctaattttgtatttttagtagagacagggtttcaccgtgttggccaggatggtctccatctcttgacctcatgatctgcctgccttggcctcccaaagtgctgggattacaggcgtgagccacagcacccaagctgatttctttttttcatttttaaaaattttttttaaagtaggccaggcccggtagctcacgcctgtaatcccaacactttgggaggccaagggaggtggatcacctgaggtcaggagttcaagactagcctggccaacatggcgaaacccggtctcggccaaaaatacaaaaattagctgggcgtggtcatgggtgcctgtaatcccagctactcgagagggtgaggcaggagaatcgcttgaacctgggaggcagaggttgcagtgagctgagattgtaccactgcactccagcctgggcgatagagtgagactccgtctcaaaaaaataaataggctgggtgcggtggctcacacctgtaatcccagcactctgggaggttgaggtgggtggatcacctgaggtccggagttcgaggccagtctggccaacatgttaaaaccccatctctactaaaaatacaaaaattagccagatgtggtggcatgtgcctataatcctagctacttgggaggttgaggcaggagaatcacttgaacccaggaggcagagattgcactgtgctgagaccagccataatttttgtatttttagtagagactgggtttcaccctttttttttttttgagatggagtctcactctgtcatgcaggctggagtgcagtggcgtgatttcggctcactgcaacctccatctcccgagttcaagcaattctcctgcctcagcctcccaagtagctgggactacaggcacatgccaccacgcctggctaattttttgtatttttagtagagacagggtttcaccgtgttagctaggatggtcttgatctcctgacctcgtgatctgcctgccttggtctcccaaagtgctaggattacaggcatgagccatcgcaccggccaagtttcaccattttggccaggctggtctcaaactcctggcctcaagagatccaccctccttggcctcccaaagtgctggaattccaggaatgagccacagtgcctggtctctattttattaatttattttattttattttatttttgagacagggtctcactttgtcacccaggctggagcacagtggtgagatctcagctcactgcagccttgacctctgaagactcaggtgatcctcctacctcagcctccccaagtagtaagtgggacaacaggcgcacaccaccacacctgacaatttttgtattttttgtagagacagggtttcgccatgttgcccaggctggtctggaactcctgggctcaaggaatccacccgccttgacttcccaaatgctgggattacaggcgtgagccaccaagtctggcccaagacaatttcttgttttatttttcttttttacttttgcttttgggtggggacagggtctcactttgtcacccaggctggagagcagtggcccgattgcacctcactgcagccttggcctcatgggctcaagcgatcctcccatctcagccccccaagaaactgggactacaggcacgtgccaccacgcttggctaattttttgtactttttgtagagacgaggtttcgccctgttgcccaggctggaatttctcattttaaacacaaaacagatacaaaagcaaaagttctcctcccatacctcagtggactgtcttactcgattctcccttggaaaccactttcgtagaccactgagccaccctcttgttttccccttggacccattttgctcacggaggcgccctgtctagttcctacccagataggccttgacttggttttgcacattctatctctgcctgcgcttagctctagacctcacgacctgtttgttgggcgagttgcttccctaagccccgatttctcatctgtaaaacgaatgatagtgtatctaccttatgggattcctatggcaattacgtaaggtagtgcatgtaaagatgctaagtggctggctacggtggctcacacctgtaatcccagcactttgggaggccgaggtgggcagatcatttgaagtcaggagttcaagaccagcctggccaacatggtgaaacccagtctctactaaaaatacaaaaattaggccgggcatggtggctcacgcctgtaatcccagcactttgggaggccgaggtgggcggatcacaaggtcaagagatcgagaccatctggccagcatggtgaaataccatctctactaaaaatacaaaaattagctgggcgtggtggcatgcacctatagtcccagctacgcgggaggctgaggcaggagaatcacttgaacctgggacgccgaggttgtagtgagccgagatcgcaccactgcactccaggctgggcgacagagtaggactccgtctcaaaaaaaaaaagaaaaagacgctaagtgaaggtagctttttgccattcctaccatctggatgggctctggccactttagggccctgagagcccggctgtcgaggccccgccccggcccgctctttgtgacgcgtgggcggtgcccgcgtgcgccccgccccgcgcctgcggctctctctgcggcttggcccgttagaggcggcttgtgtccacgggacgcgggcggatcttctccggccatgaggaagccagccgctggcttccttccctcactcctgaagggtgagaggtttacacctgctccaacagactctccccgggctagtcctctccctcccgagagctctgcttttacggtttctggatcgcttcctcatggtggtcgcgctgggtcggctccctaggtcctgggatactcccatctccccccgcccgcggccggacctttgcctctgtctctagactccccccgccctggtcagcagggataaccctcaccccgttcctaatttgccagtctgggtctgtctgycctggtctcggagcgggttttggggttcggtccttccatcatccgttcgyccgctccgcagtgctgctcctgcctctggcacctgccgcagcccaggattcgactcaggcctccactccaggcagccctctctctcctaccgaatacgaacgcttcttcgcactgctgactccaacctggaaggcagagactacctgccgtctccgtgcaacccacggctgccggaatcccacactcgtccagctggaccaatatgaaaaccacggcttagtgcccgatggtgagggccagactaggggggaaaccgaggcacccagagtgttcacccaaacctcagggcaaaaacccctgtgctcatgtgaggcggggaagggcatggctggcaccacaccatgagctcgtactctccaccctccccatggcgtggagtccattgcccacagccccaccccaagctccccacgggttcatcttctccacccctgccctttctcaggtgctgtctgctccaacctcccttatgcctcctggtttgagtctttctgccagttcactcactaccgttgctccaaccacgtctactatgccaaggtgaggcccaggacaaaggttggatttggtgccccagggccaagggagaggyggcagcagtggggagttgaggaagggttccaggagagtcatccttagctcctccttccctgccattttgccagtcatttacccagattatatatgaatacagtctcaccttggatattcagattgaacaattctgttactgcaagaaaagtagagaagagactgggcatggtggctcatgcctgtaatctcagcactttgggagcccgagatgggcagatcacctgaagtcaggagttcgagaccagcctggccaacatggtgaaaccccgtttctactaaaaatacaaaaaaaaaaaaaaaaaatagccgggcttggtgatgggcgcctgtaatcccagctactcgggaggctgaggcaggagaattgcttgaacccgggaggcaaaggttgcagtaagccgagatcatgccactgcaccctatcctgagtggcagagcaagactgtgtctcaaaaaaaaacaacaacagggacgagtgcggtggctcacgcctgtaatcccagcactttgggaggccgaggcaggcagatcatgaggtcaggagatcgagaccatcctggctaacacggtgaaactctgtctctactaaaaatacaaaaaattagctgggcgtggtggcaggcgcctgtagtcccagctactcgagagactgaggcaggagaatggcgtgaacccgggaggtggggcttgcagtgagccgagatcgcgccactgcactccagcctgggtgacagagtgagactccgtctcaaaaaaaaaaaaaacaaaaaaaacaaacccaaaacccaaacaaaaagaagtagggaagagggatgggaagaggcaaagagataagcccttacgtttcttcgaacaggtcagtgattttgagtcaaatgcaaaagtgacggcagggatgtggcccagacaaacagagattcatcttctgaagggaccctttctcaggtctagagggttccagcagggaccatgtccctttatccctgcctagaaactgagagataagacatgctggaaaaggggttgaagaaccagctggagcagaagtctgccctttaggaaaggctttcccattttcsttctcttcctgcagagagtcctrtgttcccagccagtcwctattctctcacctaacactctcaaggagatagaagcttcagctgaagtctcacccaccacgatgacctcccccatctcaccccacttcacaggtgagaccctctcagcagccgggagaccaccagctactcccacaactcccagagcccacaacgtaaggcatccatggcagggaaatgggaagcatgttgggcgggaagggggcgccagcagacagctgtttacacaaaggagtgtcagctttttatgaatacaagttagggctctcctggaccagaatctcttctgccattacttacaattttgccctgaatccatttttcccaattccagagacattgttgcattacaaaggacctctaggccctttataagctaatgtcttcactttagaaaggattgactgctagctactcagcatacttggtgtttcctaagggagagggacaaatggtggtatttgaggtggaagttagggaaggaggagtgcttgccagggaggtgggaaggtgatgcataccaccagccttacagttgccgtggtaatgttcttttagtttaatacttatgttcttttctgtgtttttctgtgtgtataagtgtgacttggtctgctttgtttatgtgtgtgtccctctgtgaacaaagacactcaggggctagaagcctgactgtctctctcccttctctctaaaccctgctgtagtgacagaacgccagaccttccagccctggcctgagaggctcagcaacaacgtggaagagctcctacaatcctccttgtccctgggaggccaggagcaagcgccagagcacaagcaggagcaaggagtggagcacaggcaggagccgacacaagaacacaagcaggaagaggggcagaaacaggaagagcaagaagaggaacaggaagaggagggaaagcaggaagaaggacaggggactaaggagggacgggaggctgtgtctcagctgcagacagactcagagcccaagtttcactctgaatctctatcttctaacccttcctcttttgctccccgggtacgagaagtagagtctactcctatgataatggagaacatccaggagctcattcgatcagcccaggaaatagatgaaatgaatgaaatatatgatgagaactcctactggagaaaccaaaaccctggcaggtataggaagttttgactctgtcatccaccctgccctcccttctgcctttcttgggagtgagaagcccattttcctagcttcagcctccagatccactcagacctgtctggacttcaggcacagctagcaactgcctcaccaattctgtgcccattgttggcttaagcactgctcaaatgcttattctctatgtaagccctgtacctggagctaccagacttgggttctggtcttgtctctgccctgtttagcattgcaatcctgagaaagtaatttctcctttcgggtcctcagttcctcatttgaaaaatgaggcgatttgtccagaggcctctaaggccccatgctaagcatgctgaatgtgtgtgaccaaagcagacactaagggaaggggaagagactggatgtagtttcctgcccgggccacctggcccagccccaccctcagtgctgtcttcttgcagcctcctgcagctgccccacacagaggccttgctggtgctgtgctattcgatcgtggagaatrcctgcatcataacccccacagccaaggcctggaagtayatggaggaggagatccttggtttcgggaagtcggtatgccagccatactgtctaatggatacatgccactgggcatcctcttggccaggcactgtgctaggctatgggagtggaggatgggcaggagaagcatgagacatagctggagagattctctccaagtgggactcttttcttaggaagggcattaccagtccactttaaaggaggaaggctcaagacccagtctgaaatgcaatccagtccagaattcattcttcacctcttcacctccctgagttgccaggcttccagatttcactccttttttttttgagacagggtcttactctattactcaggctggaggggagtggtgcgatcatggcttactgcagccttgaccacctgggctcaagtgatcctcctctcatctcagcctcccgagtagctgggactataggcatgtgtcaccatgcctggctaaatttttttttattttttgtagagatggggtctccctttgttgcccatgtttgtctagaactcctgggctcaaccaatcctcctgcctcggcctcccaaaatgctgggattacaggcatgagccaccatgcccagccttgagtcaactcttgattcttgatccacctcaccatcttcctagctttgccttagatgcagctcttcttctttccagagagttcatagaacccattccagggaatctgtaaagagattccagtctcaatgtgtcctcaacaaccagcaagtctactcccaggaaaatataccttagattttcacaaataatacaatttagcaaacatttttcgagagctcagataccatccattcatctgtttgttcaacaaatactgattgggargacaagaataacataaaaatgaatgaggtagagcatacttgtcctatataaatccagactttctataaagctcaagtaactaggataatgtgaaattgggatggtgacagacaaatagactacccagagcccagaaacagattttctgtgactgatttgtgggaaaagaggaactcccatttatggtactggaatgatgggttaaccatgaggaaaaaatgaaattgaatttctatcttacacccaaagatttgggtgtcccctgcagatagatgatcacctaggagtagatacacaaaaaacatttcaagatgatttaaagacttaagggtttcacaccatatacaaaaattaactcacaatggatcaaagacctaaatgtaagacctaaaagtgcctgtaaaactcttagaataaaacttagatgtatcttgtcatgaaaaaaaatactgattggggacaaactctactagatatttaagatgttagcagtatgtgcaatagagccagtcctctgtcctcttggaatctagggcaggagagagacaaggaaatatgcaggatggtgtgatgggatcagtgctgtagcagggataggcacaaagtacagagagcagatggggtgggttggggacaactctccatgtttgggaggatcagagggtgcttccaagaagaactgatgtttaaactgagacctgaagataaaagaagtgaatccaggcaaaagaaggggcttggtagaagattcctgatagagaatagtatgtgcaaaggctatgatgcaaagaagagtagaaatttcttttgtatttttttgtagagacagggtctcgccatgttgcccaggctgatctcaaactcctgggctcatggaatccatctcagccacttccactcagctggaattacaggcatgagccaccgtgcctggcccaaagaagaggtagaaatttcatgagtgaaattagtatgctaacaatgagcatactgtttctgctcttaaggggccaagaacccatgagggagttaatatggatacagtaatattacaaagggagtgtggtcggtgaggttcttaaacaaaatgcaagaagttcagggttttatggagggagctcactggatttgatggcttagataagaggacagtaaggagggagtcccttttacctggagcagagcagcaggagacagagtcaaagagatcaacagggtcatgacgcaaaaactcttgaatggcaacatgagcatttgcactgaatttgataggaaaggggaatccaataaagatttctggccagggacatgatgcctccgttatgtgggaggagcaggcaaggtgccataggagattgcatgcactgtgacaggctgtgcccatgggggaggaaggaggaccgtgggattgactaaagatactgcttagcacgatctcctgctagtgctgaggaagctgagggcagaacccagctgggagattggtaactccactctgaagaatagcttccaagaacttggaggtttccaacccaggtacttggatagagcataggttttagagttggaaggacctggacccatgtcccagcttccccatctgttagataagtggctttgagcaacttactcaacctcactgagagtcagtttccttgtcagtaaatgagagtaatattagtatctctgctgttatagggttgtcgtgaaaactaaatgaaatgagagcatgtgtagccatagtgctggcactgggtcacctctttgtaaatattagcattatcattagcagaggtggcaggggagggttatgagttcttttcagataggctaagttggggtatctgtaagatcacccaatcacagacatctgtcaggcacttggcaatgaggatttggagcccaagagagagatcagagctggtgataaagatttgggtgtcactcgcagatagatgattacctaggagtagataaatcatccaggaagagggtgaagaaatagctgaggcaaggtccttgaggaacccttggggaggaggccaagtagaaaacccagagaagcttttggaagaggctaaatgcaaagacattctgcagggcccaccctggagggctgaggcatgggagaaggcaggccgctgactctcagcttcagcctcacccattcccctgccccaggtctgtgacagccttgggcggcgacacatgtctacctgtgccctctgtgacttctgctccttgaagctggagcagtgccactcagaggccagcctgcagcggcaacaatgcgacacctcccacaagactccctttgtcagccccttgcttgcctcccagagcctgtccatcggcaaccaggtatctagcccggcagcccgcagtgggaaaggcagaactgggtggcaggggtggggtggtggtggccagcaggtggggaggggcacgcacctctcccctatctcctgtgccacaggtagggtccccagaatcaggccgcttttacgggctggatttgtacggtgggctccacatggacttctggtgtgcccggcttgccacgaaaggctgtgaagatgtccgagtctctgggtggctccagactgagttccttagcttccaggatggggatttccctaccaaggttagaacctttccccaaagctcagccccatccctaccctcaccccattccttccagttacttgctgtgagtagcgctagtttgtggaagggggcttgggcccctggcttctgagaacccgtcctcactgaayctcctgcctctctccaagagaccattgcaccccaccccaccctccaccaatagagcaggcaaaggagtggggacccagagggctgagaaaacaggagctagaggttctggtcccaactctgccagttacttgctgggtggctgtgatcaagtcacttcctactcaatcaaagagtcatctctacaagaaatgactgagtgacacgtgcaccactgcccaaccctgtgatccaggacttcccggccttagcctgacgggcttcccagctcttccagtgccttccctgctcaattaaatcaacttggctccccgttcccctgagttacctcccctgtggaatgacctgttgttttagatccaggcctctcctcctgtagttagcagggaaaaccaaggcaaggaaaagtaagggcagctgaagcaagggctggtagctgagctggggggcccatgtccagctcttgtccctgggccccttgatctggaatggggaggcgaggtccaaagaaggcagtgactcacttcccccttcccttatctaccattaccagaaaaatccttgacatcaggccactaatcgggtccctgtcccatgttctggacccttatctaccccgtcctgccccattcccgcttcctcagccactttcccagtaagctgactggcagcctcatactctcccaggctcctggcttcttcccagcaacctgtgacagagcggcaggggaaaggcagagggaaagcggagtgaggggccgcctgtgtgtggaagacctgggtcttgggccacaccctgcccctggctctgccctagcagatattccctggagtgctgctgcctggtgaggcttctgataccctcttccctctctctggctcttggcttagatttgtgacacagactatatccagtacccaaactactgttccttcaaaagccagcagtgtctgatgagaaaccgcaatcggaaggtgagcacccctgccctgcccctccttctcccagcaccccctcaatcagtcaccataactggtctattctgaggccccctctgcragcagctaggatgtggaaagcggttcctgcttgcatctctggggcagaggcctccaccagcaggctctcctccattcctccagtcctggcggaagcaaggccctcctaggcagctggtggataacagaggagggtcctaagagcaccacaggaagaacccttggctgggccaggacttggacgttgaggtctcggtctgtctcctcttcttactcaccaagtagcctgggatgaggcacttccccctctgagcctcagccgcctgtttctgcatgaaaggggttgggctgcttgatgtctcctctggctttaaaaacccacatttgagtttcctccttccctctactgccctgtgcccatgcctgcccacctctcgttcttttgggcttctgacacctcccctcctccccactcctggcacctggctctgtgatacagaccgtctgcactgaatctstgtgtaggtgtcccgcatgagatgtctgcagaatgagacttacagtgcgctgagccctggcaaaagtgaggacgttgtgcttcgatggagccaggagttcagcaccttgactctaggccagttcggatgagctggcgtctattctgcccacaccccagcccaacctgcccacgttctctattgttttgagaccccattgctttcaggctgccccttctgggtctgttactcggcccctactcacatttccttgggttggagcaacagtcccagagagggccayggtgggagctgcgccctccttaaaagatgactttacataaaatgttgatcttcagcctgtgtggcctgttctggtgtgatccccatcctcagcactgctaccctgccccgtggcagtcagtccccaacccctggttttatggatccacctgccggtgagagaatctcatgggaatggtgctcagggaagcagccatctgccaggagaagcagaagacctgagaacccagggaggtgaactgaggaaggccaagaaggctggggccctagggatgatgtgggcatgtgggcacctgtcttcatttctgaagccctaagccccgtgatgtcagatgcgagtgtagtattgttcctctgtaggataaaggccaaagcctgatgagatcttttccaaagggaccaatcctggggtatagggagtgtgcaccttgcacttaatcaggaagggaaaaaccaggaactatagcctagatcaggaaaccttggggttgtttttgttgttgttgttttgtgtttgagacagggtctcgctctgtcacccaggctggagtgcagtggcatgatcaccacccactgcagtcttgacctcctgggctccagccacactcctacctcagcctctcaggtccctgtgaccacaggaatgtgccactacgcctggctaatttttaaatttttttgtagagatggggtccctccatgttgcccaggttggtctcgaactcctgggctcaagcaattttcccacctcggcctcccaaagtgctgggattacaggaaggaaacccttggtgtacaggaatttgccagatgatctggatgtttaagtggttgcatcttaacaacctacattgaggtatgactccagcattggcctttattattattattattattagtgagacggagtcttgttctgttgcctgggctagagtgcagtggcactatcttggctcactgcaacctccgcctcctgggttcacgtgattctcttgcctcagcctcctaagtagctgggattacaggcgcacaccaccatgcccggctaattttttgtgtatttttagtagagaaggggtttcactatgttggccagactggtcttgaactcctgacctcgtgatctgcccgcctcggcctcccaaagtgttgggattacaggtgtgatccaccgtgcctggctcagcattggcctttaataagttgacatatcccaaagtatgttccagggacactgtagagtctctctcccttctataggttcgcagtaattaacagcattttgttaaagcttgcttactatgacagttcaaacatgcacaaaaatagaaaagtataatgcactgtcatgtacccttcacccagtttccatgatcaacacaaggcctatcatctgacagcatgttaaggccctccggagcgcggtaatagagaaacctgtttaacctagtgcttcccaaactcatttcaccacaatcccttttccacctaccaccaaaaaacttgaacttgtttttatttattgagcatggacaacatgcccagccctgtgcccacagggccacttgtctctgtgttgtctggcccgaggacacaagacaacgggctgaggagaaacagacctaagcaaagaggaaccatccagcctagtgactgctcgatgcgggagccaagtgtgctcagtgggaggcaggacctagcagagcactgtcatgaagagggccccgggcagggtggggcacaagccacgagtggcatggactaagccacgagtagcatggactaaaccacctggcagacctaggaaaggaagacagacacccagggggaaccggtgaggacagcgagaggctggtgggttagtcatctggcatcagacggtgggtgtgccaggaagagttcccagacacagcaggaatatctgaacgatgggtgggggcagttcctagtcggggctggattaagtatccttagctgctggggtttcttctctggccagtccgtgaaggcctctgagggcaatgcttcctcttcactctctccttggcccgtgtggggttgggtgagtgcactgagctgggagggatgggctgagatctgctgaggtgggtgtgtcccctcccgccccgggagcaggtcctaccagcccagcccagcccagcccagcccagagcaggcagcggaagccagcttggggcagcgcagagcaacacggagcacaggtatgggggtgtcacgaattgaactgcacagggagcacaaggggagcacccccctgtagaaatgggagatttgggtgggggacagagaagagggtgggcatgggccctggaaaacccttctgaacagagtaaaaagccgaaaggagctgcctcaaatagacagatcttttcagatggcgctggacaaacagctaacatgcctgctacacctcgggagtgctcctctttgatgcttgaagcccccactctggggcatctcgcagaggctgtgtcctccccctccccctctaggcccccactgtggaactgagccttgggcctcccagggagggccctctggggactgtttacacactttttccactcgcagttaaacctcaacccctacaccacacatcccccagggccaggcagatgacaatgagctgatctaatcaaacttgctaatgggttgactggcagagatgtgttctcagtgttatccttcccaactagccaaggtgtactgtaatggggtcttcaggaagtgctgccttaacccaaaaggtgcatctatataaggggattagactgatggtctttgatgtccctatggctctgatagatggtggcttcaggggatggaattttggaggtgggggacatattcggaggtcagcagggctttatgataccttcacatcacaccatgaggatggggcctacctcttccctgtggttgtggggcccccatgacaagaaggggacctccaccagattgtatctccagaactactcctttttttctctcttccttccttcctttcttttttttttttttgagacagagtctccctttgtcacccaggctggagtgcagtggcacgctctcagctcactgcaacctccgcctcctgggttcaagcaattctctgcctcagcctcctgagtagctgggattataggtacgcaccaccatgcccggctaatttttgcatttttagtagagacagggttttaccatcttggccaggctggtcttgaactcctgacctcatgatccacctgcctcggcctcccaaagtgctgggattacaggcataagccacggtgcccagccattttttttttcaagacaggatctcactctgttgcccaggctggagtgcagtggcatgaacatggctcactgcagcctcaaactcctgggttcaagcaatcctcccacttcagcctcccgagtacctgggactacaggcaggcaccaccatgcccggctaatttgtttttttttttgagatggggtctcgctctgtcgtctaggctaaagtgcagtggcatgatctagactcactgcaaactccgcctcctgggttcaagctattatcctgcctcagcctccagaatagctggaaatataggcttgagccaccacaaccagctactttttgtattttttttgggtgtgtgtgtgtttgtgtagagacagggtttcaccatgttgcccaggctggtcttgaactcgcgctaaagtgatccattcgcctctgcctcccaaagtgctgggattacaggcgcgagtcacacactcggcctctgttagttttttgaaatttttttgtagagcggacgtggtggctcacacctgtaatcccagcactttgggaggccaaggcgggcagatcacaaggtcaagagatcgagaccatcccaggcaacatggtgaaacccccgtctctactgaaaagacaaaaattagttgggcacggtggcacgcacctatagtcccagctgctcgggaggctgaggcaggagaatcccttgaacccgggaggcggaggttgcagtgagctgagatcacaccactgcactcaagcctggcaacagagcgagactctatctcaaaaaaaaaatattttttgtagagatggggtcccactatgctgcccaggctggcagaaatcctccttttagggtgagctaaagttgtagacccagtgggacatggaggcagggattgaggtgagacagaaacttactcacatgcagtatgtacaggactcaccacccagccactcagaggcactagagcccaactccatctgtctgatgccatctgctctccctactctgctgcccccagtgcataccccaggacatacctactgacagagatcttttatgcccaggggcattttaaaaagcccaggagaatggccgggcacagtggctcacgcctgtaatcccagcactttgggaggctgaggagggcagatcacctgaggtcaggcattcaagaccagcctggccaacacagtgaaaacccatctctactaaaaatacaaaaattagccaggcgtggtggcgggcgcctgtagtctcagctactcgggagactgaggcaggagaattgcgtgaacccgggaggcggaggttgcagtgagctgagattgcaccactgtactccagcctaggtaacacagcaagcgagactccatctcagaaaaaaaaaaaacaaaacccaggagaaggagccggcaagagcagtgagggctgaagccagtgcactctaaagtcaggtgaggtcagcaaagcccacaggctctggtggatttccctgaggaagcaggacctgccaggctacaagcaagggtcagatgcacacagaccacctcaggacacaggtcagggggctgggcctgcctccgtggcttctcttgggactgactttcttgcttttccagctctcgaaagcagggtaaagggagaggcacaatggcaaggtgatatccgcacatcagggaaactagttattgagctgtagaccacctttgctttctgccttttcccagacaaatgtcaggagggatgaggtcagagtactcagggagggagaagccagggccgaggatgatgctggaaatgcaggaaaagacaggcttcagcagagaagggtggggaaaggcaggagcaggaattctggctggagaagcaggcaggcctgggccagggaggagggaagacacgacctgacacccgggatccgtgccagagactcctctctgaggaagaatgtggcccctgggcagaaggaggcctccccgcctaccctggggactttgtactgtctccaaaccttgaggatgaggattcatcctcctgttccatttagtcttccatctcatccctgcccctcaggaccaggataagcggaagaaaaggattcatttgtgccctcaaaacagctctgggacagagcttttcacaaaggctttggactgagctaagcttctgctggaggctcagcacagctggggtctgtttggagggcctggatacagagatactgagtcttcatgatgaagcctgtctgtggggaaagggtgcatcctcccagcgctgcctgaacacagaagcagaggaagtaggcttcgctaattcagcgagtgggttagagtacatactaaagagggacttcctgtgtcggggctgagacactgatgggccacgagactctaaaatgagggtggggctattccagagctgattctcaggggcaaggaggatggggagatgtaagaaccttcttttcagacctctgaccctaggaattggagtcaggggacccaggatgtgaattatttgaaagaggaggcaggccgggtccagtggctcacgcctgtaattccagcactttgggtggccgaggcaggcagatcacaaggtcaggagttcaagaccagtctggccaatatagtgaaaccccgtctctacgaaaaatacaaaaaattagccgggtgtggtggtgtgcgcctgtaatcccagctactcagggggctgaggcaggagaatcgcgt

SEQ ID NO: 6795 - DNA, 15922 bp, Homo sapiens
ttgacctgtacaggcccctggctaagagtcaccccagtgggactgacacttctggttagaagcttcacctctttcccccactccagctttcaactctagacagctttctgactgcttctggagtggcagagcatgggataattgattcctgctgagggccttttctaccagtgttagggtgtagcccggaggtctcggtccccatgacccgcaattccattcctagyctccgggaccctgctcagcaagtgcggaaaacagcggggctggtgatgacccacctgatcctcaaggacatggtgaaggtgaaggggcaggtcagygagatggcggtgctgctcatcgaccccgagcctcagattgctgccctggccaagaacttcttcaatgagctctcccacaaggtgagaggcagagaggcactgagggctggctgcagagggaatctgtaggtcacctcatctccttaacatggctctctctgtcttacagggcaaygcaatctatratctccttccagatatcatcagccgcctgtcagaccccgagctgggggtggaggaagagcctttccacaccatcatgaagtattgctccccgggccctggggcacattttccacatagcacgggcttaggaatcagacacacctgtatttgaattccacctcggctactctttagctgtacagccttcggcaataacttagcctctctttgtgcctatttcctcttcttttgaggctgatgatacttaacccttagttcttgaaaatattaaatacgataaagttcctaacatggtggcagacatacagtagcactcactccctagcagctgctcctgttaatttccattcacagtgaaaattcctgagccgggggcggggtggggtccctctctgctgaatgggacagggcaaggggagtggtgaggcagacaggggccgtggcagagaacatcagagaagacgagtgctgggggagggtccagggttggtcttagtggatggcagagctggccctgggccatcgaacatcctcatcttcccttcctgcagacagctcctctcctacatcaccaaggacaagcagacagagagcctggtggaaaagctgtgtcagcggttccgcacatccckgtatgctgccctccctgagggttctttgtgctgagcggggccctgcaggggagaaaggcccatccctcaccccttcaatgcccccactgtggcatccctgggactggggaggctgatggggaaggttgagcctttactagctggatctcccagttcctcacaaagcccttcctatctgcagaactgagcggcagcagcgagacctggcctactgtgtgtcacagctgcccctcacagagcgaggcctccgtaagatgcttgacaattttgactgttttggagacaaactgtcagatgagtccatcttcagtgcttttttgtcagttgtrggcaagctgcgacgtggggccaagcckgagggcaaggtgagcagcacaggacacttcaatgcctgttgggttctgggctggctaagacatctgccggccctgggcagcatacggctcttgcagtcaccttcccgtcctccttatccccagctgggttgcaaccaaattgccagagtgacctaagaccagatctttgtctccagttctttttttattactccaaaaacacaaccaaagcagcatctcatccaattcttgtttgtttgtttttaatagtttttatttttcagagcagttttaggttcaaagcaaaattgagcagaaagtacagggagttcccttctaccccttgcccctacacatcacagccttccccaccttcaacatcctgcaccagggtggcacatttgttacagctgaacctacacttacacatcatctcctaaagtcatggtttaccttggagttcactgcacgtaatgacatgtacccaccattgcagtatcatacagaagagtttcactgccttacaaatcccctgcactccacctatttatccctctctccccacaacccctgatctttttactgttgccatcactttgtcttttccagaatgtatcattggaatgatccggtatggagccttctcaccttggcttcttagtaatgtgcgtttaaggcctccatgtcttccatggccttgtttctttttaatcagaagtaactgttttcaggcctgctctgaatctccttttctccctccaggctataatagatgaatttgagcagaagcttcgggcctgtcataccagaggtttggatggaatcaaggagcttgagattggccaagcaggtagccagagagcgccatcagccaagaaaccatccastggtacgtaaggcagcctgtgcgggcgagaccagactgggccctcccctcctgcagtgatttgtttcttcttcttttttaaatcacgttttcctgccttttctaggttctaggtaccagcctctggcttctacagcctcagacaatgactttgtcacaccagagccccgccgtactacccgtcggcatccaaacacccagcagcgagcttccaaaaagaaacccaaagttgtcttctcaagtgatgagtccagtgaggaaggtatgatgctcccgcctgttcccggccgagaaggcacacagctagggtgcagagggctggtttccataggacctgctgcgggggcctgagtgtagatgctctgccccactgccgcagaagggcctctcctgtacagcttggattttatttcttctgtgcggtgtgggattgtctcacttgttctctgatatctattttttcaccatctttgtgactcagctttttcttattcctttaattctttgcatagatctttcagcagagatgacagaagacgagacacccaagaaaacaactcccattctcagagcatcggctcgcaggcacagatcctaggaagtctgttcctgtcctccctgtgcagggtatcctgtagggtgacctggaattcgaattctgtttcccttgtaaaatatttgtctgtctctttttttaaaaaaaaaaaaaggccgggcactgtggctcacgcctgtaatcccagcactttgcgataccaaggcgggtggataacctgaggtagggagttcgagaccagcctgaccaacatggagaaaccccatctctactaaaaataaaaaattagccgggcgtattggcgtgcgcctgtaatcccagctactcaagaggctgaggcaggagaatcgcctgaacccagaggcggaggttgtagtgagccgaaatcacaccattgcactccagcttgggcaacaatagcgaacctccatctcaaattaaaaaaaaaatgcctacacgctctttaaaatgcaaggctttctcttaaattagcctaactgaactgcgttgagctgcttcaactttggaatatatgtttgccaatctccttgttttctaatgaataaatgtttttatatacttttagacattttttcctaagcttgtctttgtttcatctttcacattagcccagtttcatgcagcagagagagggttatcagtgcagagagagatgagtgagcccagagtcctagggcctgtcccgggatggcagatgagcttcctgccccgtcactgccacctttcccctctcaacctctggaccctgcacagtgaccagacagcctctctggggagaattatgcagtgcctaggctccagatcagtgcttctgaaccgggggcaattttgtctgccagaggacatctgacaacacctggggcctgttttgttgtcatagcctataggggaagaatgctaccagcatttgtgggaagaggccagggatgtggctcaacatcctgcagtgcacaggatggcccctcaacaaagaatcacacggcccacaatgtcaatagcgtcacagttgagaaaacctgctctagaccaagggttgctttctgccgtgtgcctcaccccacccccactcgtgttccctaatcccatctccaaaggttggcagcagaccggcccaggctcgtggaagttcagatcatgatcccctccagctctgcaggagacaagacctgtctcccagcattcctcattgttcccgggtctgcagagggcgtgagctatgctgcaggcgggctgccccctgaagcctgcgcacccctctccagctcctcaagtcttctctgctgagtcaccttcgaaccggaggctgtgagctggctgtcgtgaccacactggtgcctctgctgtcatgacaacagcacactacgtcagtagtgctccctgggcactgagctccctctttgcggggagaagacagtaatgaaaaatgacaagcatgaggcagaggggaagatcacgcttgggtggtgcaggagcatggaggtgctcttaatgctctcaatgagaaagggttaacggtcctggttgcaggaatagctgagtcagaggtggggcttcctccactcccccaccccacccctttcaccattagggaccttcttgccttgctcttgctactctgctctgggtggtcattgtgaaaagcccgcaccaaccatgccagtggcagccagacgaggacacagcctggctctgggtcccagcaggaaaggcaatcccagaaaggcagggtcagggactggagtcctgtgggtgctttttaagcaaagattatcaccaggcaggctaaacttagcaaccggcttttagctagaagggcagggggctggtgtcaggttatgctgggccagcaaagaggcccgggatccccctcccatgcacctgctgatgggccaaggccaccccaccccacccccttccttacaagtgttcagcaccctcccatcccacactcacaaacctggccctctgccctcctaccagaagaatggatcccctgtgggagggggcaggggacctgttcccaccgtgtgcccaagacctcttttcccactttttccctcttcttgactcaccctgccctcaatatcccccggcgcagccagtgaaagggagtccctggctcctggctcgcctgcacgtcccagggcggggagggacttccgccctcacgtcccgctcttcgccccaggctggatggaatgaaaggcacactgtctctctccctaggcagcacagcccacaggtttccaggagtgcctttgtgggaggcctctgggcccccaccagccatcctgtcctccgcctggggccccagcccggagagagccgctggtgcacacagggccgggattgtctgccctaattatcaggtccaggctacagggctgcaggacatcgtgaccttccgtgcagaaacctccccctccccctcaagccgcctcccgagcctccttcctctccaggcccccagtgcccagtgcccagtgcccagcccaggcctcggtcccagagatgccaggagccaggagatggggagggggaagtgggggctgggaaggaaccacgggcccccgcccgaggcccatgggcccctcctaggcctttgcctgagcagtccggtgtcactaccgcagagcctcgaggagaagttccccaactttcccgcctctcagcctttgaaagaaagaaaggggagggggcaggccgcgtgcagccgcgagcggtgctgggctccggctccaattccccatctcagtcgttcccaaagtcctcctgtttcatccaagcgtgtaagggtccccgtccttgactccctagtgtcctgctgcccacagtccagtcctgggaaccagcaccgatcacctcccatcgggccaatctcagtcccttcccccctacgtcggggcccacacgctcggtgcgtgcccagttgaaccaggcggctgcggaaaaaaaaaagcggggagaaagtagggcccggctactagcggttttacgggcgcacgtagctcaggcctcaagaccttgggctgggactggctgagcctggcgggaggcggggtccgagtcaccgcctgccgccgcgcccccggtttctataaattgagcccgcagcctcccgcttcgctctctgctcctcctgttcgacagtcagccgcatcttcttttgcgtcgccaggtgaagacgggcggagagaaacccgggaggctagggacggcctgaaggcggcaggggcgggcgcaggccggatgtgttcgcgccgctgcggggtgggcccgggcggcctccgcattgcaggggcgggcggaggacgtgatgcggcgcgggctgggcatggaggcctggtgggggaggggaggggaggcgtgkgtgtcggccggggccactaggcgctcactgttctctccctccgcgcagccgagccacatcgctsagacaccatggggaaggtgaaggtcggagtcaacgggtgagttcgcgggtggctggggggccctgggctgcgaccgcccccgaaccgcgtctacgagccttgcgggctccgggtctttgcagtcgtatgggggcagggtagctgttcyccgcaaggagagctcaaggtcagcgctcggacctggcggagccccgcacccaggctgtggcgccctgtgcagctccgcccttgcggcgccatctgcccggagcctccttcccctagwccccagaaacaggaggtccctactcccgcccgagatcccgacccggacccctaggtgggggacgctttctttcctttcgcgctctgcggggtcacgtgtcgcagaggagcccctcccccacggcctccggcaccgcaggccccgggatgctagtgcgcagcgggtgcatccctgtccggatgctgcgcctgcggtagagcggccgccatgttgcaaccgggaaggaaatgaatgggcagccgttaggaaagcctgccggtgactaaccctgcgctcctgcctcgatgggtggagtcgcgtgtggcggggaagtcaggtggagcgaggctagctggcccgatttctcctccgggtgatgcttttcctagattattctctggtaaatcaaagaagtgggtttatggaggtcctcttgtgtcccctccccgcagaggtgtggkggctgtggcatggtgccaagccgggrgaagctgagtcatgggtagttggaaaaggacatttccaccgcaaaatggcccctctggyggtggccccttcctgcagcgccggctcacctcacggccccgcccttcccctgccagcctagcgttgacccgaccccaaaggccaggctgtaaatgtcaccgggaggattgggtgtctgggcgcctcggggaacctgcccttctccccattccgtcttccggaaaccagatctcccaccgcaccctggtctgaggttaaatatagctgctgacctttctgtagctgggggcctgggctggggctctctcccatcccttctccccacacacatgcacttacctgtgctcccactcctgatttctggaaaagagctaggaaggacaggcaacttggcaaatcaaagccctgggactagggggttaaaatacagcttcccctcttcccacccgccccagtctctgtcccttttgtaggagggacttagagaaggggtgggcttgccctgtccagttaatttctgacctttactcctgccctttgagtttgatgatgctgagtgtacaagcgttttctccctaaagggtgcagctgagctaggcagcagcaagcattcctggggtggcatagtggggtggtgaataccatgtacaaagcttgtgcccagactgtgggtggcagtgccccacatggccgcttctcctggaagggcttcgtatgactgggggtgttgggcagccctggagccttcagttgcagccatgccttaagccaggccagcctggcagggaagctcaagggagataaaattcaacctcttgggccctcctgggggtaaggagatgcygcattcgccctcttaatggggaggtggcctagggctgctcacatattctggaggagcctcccctcctcatgccttcttgcctcttgtctcttagatttggtcgtattgggcgcctggtcaccagggctgcttttaactctggtaaagtggatattgttgccatcaatgaccccttcattgacctcaactacatggtgagtgctacatggtgagccccaaagctggtgtgggaggagccacctggctgatgggcagccccttcataccctcacgtattcccccaggtttacatgttccaatatgattccacccatggcaaattccatggcaccgtcaaggctgagaacgggaagcttgtcatcaatggaaatcccatcaccatcttccaggagtgagtggaagacagaatggaagaaatgtgctttggggaggcaactaggatggtgtggctcccttgggtatatggtaaccttgtgtccctcaatatggtcctgtccccatctcccccccacccccataggcgagatccctccaaaatcaagtggggcgatgctggcgctgagtacgtcgtggagtccactggcgtcttcaccaccatggagaaggctggggtgagtgcaggagggcccgcgggaggggaagctgactcagccctgcaaaggcaggasccgggttcataactgtctgcttctctgctgtaggctcatttgcaggggggagccaaaagggtcatcatctctgccccctctgctgaygcccccatgttcgtcatgggtgtgaaccatgagaagtatgacaacagcctcaagatcatcaggtgaggaaggcagggcccgtggagaagcggccagcctggcaccctatggacacgctcccctgacttgcgccccgctccctctttctttgcagcaatgcctcctgcaccaccaactgcttagcacccctggccaaggtcatccatgacaactttggtatcgtggaaggactcatggtatgagagctggggaatgggactgaggctcccacctttctcatccaagactggctcctccctgccggggctgcgtgcaaccctggggttgggggttctggggactggctttcccataatttcctttcaaggtggggagggaggtagaggggtgatgtggggagtacgctgcagggcctcactccttttgcagaccacagtccatgccatcactgccacccagaagactgtggatggcccctccgggaaactgtggcgtgatggccgcggggctctccagaacatcatccctgcctctactggcgctgccaaggctgtgggcaaggtcatccctgagctgaacgggaagctcactggcatggccttccgtgtccccactgccaacgtgtcagtggtggacctgacctgccgtctagaaaamcctgccaaatatgatgacatcaagaaggtggtgaagcaggcgtcggagggccccytcaagggcrtcytgggctacactgagcaccaggtggtctcctctkacttcaacagcgacacccactcctccaycttygacgctggggctggcattgccctcaacgaccactttgtcaagctcatttcctggtatgtggctggggccagagactggctcttaaaaagtgcagggtctggcgccctctggtggctggctcagaaaaagggccctgacaactcttttcatcttctaggtatgacaacgaatttggctacagcaacagggtgrtggacctcatkgcccacatggcctccaaggagtaagacccytggaccaccagccccagcaagagcacaagaggaagagagagaccctcactgctggggagtccctgccacactcagtcccccaccacactgaatctcccctcctcacagttkccatgtagaccccttgaaraggggaggggcctagggagccgcmccttgtcatgtaccatcaataaagtaccctgtgctcaaccagttacttgtcctgtcttattctagggtctggggcagaggggagggaagctgggcttgtgtcaaggtgagacattcttgctggggagggacctggtatgttctcctcagactgagggtagggcctccaaacagccttgcttgcttcgagaaccatttgcttcccgctcagacgtcttgagtgctacaggaagctggcaccactacttcagagaacaaggccttttcctctcctcgctccagtcctaggctatctgctgttggccaaacatggaagaagctattctgtgggcagccccagggaggctgacaggtggaggaagtcagggctcgcactgggctctgacgctgactggttagtggagctcagcctggagctgagctgcagcgggcaattccagcttggcctccgcagctgtgaggtcttgagcacgtgctctattgctttctgtgccctcgtgtcttatctgaggacatcgtggccagcccctaaggtcttcaagcaggattcatctaggtaaaccaagtacctaaaaccatgcccaaggcggtaaggactatataatgtttaaaaatcggtaaaaatgcccacctcgcatagttttgaggaagatgaactgagatgtgtcagggtgacttatttccatcatcgtccttaggggaacttgggtaggggcaaggcgtgtagctgggacctaggtccagacccctggctctgccactgaacggctcagttgctttgggcagttactcccgggcctcactttgcacgtgtgcttacctagtggagacaaaagtacatacctcggtagagcgcgcacgcctgtaaccccagcactttgggaggccaaggtgggtgtatcacctgaggtcaggagtttgagaccagcctggccaacatggtgaaactccgtctctactaaaattacaaaaatcagccaggcttcatggcacatgcctatagtcccagctacaggcatgctgaagcaggagaatcgcttgcaccccggaggcagaggctgcagtgagctgagaccacaccactgcactccagcctaggcaacagagtatgagactccatctcaaaaaaaaaaaaagtacctacctcagagttcaaactagtgaatattaggaagtgcttgagacagtgacaccaaagtgcacaataaatactcgccagtttcattattattaaagaatccatttgaatgtcagctcaacacagcctcctataccgaggcattgtgaaccgcatctccccagcttctccaggcttttccaagaatcagggacactgtagcctgttggtctcagtgtatgacagacacggaggaagcacatctttagctgatacttaaacagagaccctgagcgcacatacacccgcgcacacatgcatggagcttcaccttctctgtcattctgcagtgaccaggagagcaagagctcccacctcccttcaaaacactgtgcccatcccgggcactaaggcctctttaaagcacggcacctccacgagggagggccacagccacatacactccacctggcaggtggacagcgtgagcatgtggaccatagcagggacaaggtgccccggccagccccaacgccctctgccgctgacagggacagaagccctctccagctgcgtgtgctgcagaggccatgcgtagcctccagctgcattctattccactccagtgcctgggccagttagcaccagtgtggaagacagtgagctggctccggacaacagggatggaggaaaggtcccacattcacattcctgatacgtggacaaggtgaggggccgcaatcgctctggcagcattttaaagatggggaagtagcagacacccacgcgtgaaggcaggagagccccaactgtggtggaaatggccccagaatggtagggccaagcctagctccagacaccccagagccctggagaagccaagactgagggagaaagcctgagggaggagcgccccagtccccagggrccggcctggtgcagagctgcagctgatgttcccctctgtgcagccccaccctctgcctcgctgagctccctgctgcgagggcctcgggtgcaagggggaggcaggtctctatctcatggagctgtcagatgagacatcgcgatcggagtcctcagcctcgcttggcggcggcggcgggtcgctaagcgggaccgcagtgaaagcaggagactttctagaaaaaaacaccagttgtcaaccttggggcaggcaggaatcctgaagacggacggcactcctcctcctgctgcctcaccctctggcagcccgtgagaagtaccggaagcgagggcggggccgcgggatggcgagggagcggcagggactgaactctctccaaacccaccctgacagggaaatgggccccgcctgtgtcttgggaactcagaggctgaggtcaggcatgatggctcacgcctgtaattccagcactttgggaggcagaggcgggtggatcacgacgtcaggagttcaaggcaagcctggccaacatggtgaaaccccatctctactaaaaatgcaaaaattagccaggtgtggtggcgggcgccttggaggctgaggcaagataatcacttgaacctgggaggcggaggttgtagtgagccaaaaaaaaaaaaaaaaagaaatagctgaagtcacagtaggagagaagctgctgagcctccagcaccctgactctagggccttggctttatgtctatctgcagtatttttgtgatttttaaaaattcactttcttgttgcggtgtaacttacacagggtcaaatgcacaaatcatggccctgactttagataaaaatctgcccccacaacccttctgttccttgccagtttttaaactgcctctaaccaggggaaccaccagagctggtggccttgggaggtttcagccctcccgtcatgaatggacatagctcatccaactgccaagggagagagctgtgggtctgggccagccccaccaggtaactcccaaagggcagccccacagcaagatgtgacccagtcattgcctgagggtctctggggctgtgttccaacctttctccccgctgtgtccccctggaaggccccatgcccaggggaggcgcctaccggtctccagactgggtgatgagccggcggcaggtctccatctgcacgtccaggccgcgcttcatgctgcacatctccatgtactcgtgcaggtgccggttcatgtcgttcttggccgtggccaactccagctgtggtggggcaggcagggccatcggggttaacaggtggcgttcacagcgcctctgttgcccccgccaggaggccaacacgccaagagcagtggctgggccgggggcccaggcagccattactgaaggctcagattttaaaataaaccagaccaaggcagaaggcagcgaatacaccattgtttcctctgcttttcctggaaatctttgcctatggaggaatgcaaaggtactgctgcaggctgtgttcttttaagactgataagagtggtgaggaaagtcagtgtgggcgggatggagcagatccacaggctcccagggccacacaggttcctatggggcccggctcacccctcatcccctgtactgcgctggtcctgggctgtcccctcactgcactgtgagctcccgtaagggttagcgacaggttttcctcatcctggcagacccagacctcgaagggaattaactctctctgtgacccgtggcatacaagcctggctaactgctgaaaggggcccaatcctcttaccattctctccttatcactttattttctcacctaaaagccattttcagacactaaaaggaagactcccatattggaggtgccattgattctgagacctgtcctgatttcagaaatgtcacacgtggaaaacacggggctcagaatcaaagaaatccggtctccctccccgggcccattctgcagcccacactctgaggcaggcggagaggcagggcccaggcagcacaaactcagtgccagggacagtcgactgcctctctttgttttgggtacaaagggcaggggccgcaaggggaagcaaaatgaaacttcctggagatgacgttcgtgactgcctgagtgaagagaacggggaggataccagctgccataatgtggattggacagagagggtgggaacttagagaaagaaggaaacaggttacagggccagacagcagagatggtcaggacagtgacatttggggtgagatggcggctggctgggtgagaagccctagtggggacagcttccctggcaggcttggatccacagctggggccccacagtagtgggaggagcaggacacggtgactgttcaacccagggggaaaatacagtgccaccagcccttgttcagatcagctgcctacaccccaatttctccaccttggaagaaccggagtgcagggagctgggttctggaaccatcactcagggagactgggaagaaggaaatgaaccaaatatattctactgaaatacaaggctagtactgccaccagtagtctctgcatatgtctatgtccccacttaattcacaaatttacagcaggaacaaggtcaggaggtgaacgtgcatgtcaggagatgtccttgacaagccaccttgaaaactgcaggctcgctgtgtgaacagacttgggggtgggacgggaggagacagagagaggtgaggagcggtggggaagaactgcctcccgcccaccactctgggccttggctttaccttgctccatcttagtgaccctgagagatcaaaggtcacaaagataaaggcaccttgggtactcctgaggtcagcaagtcctcctaacggttcccctaatgcagaagtccccaaaccccaggccacggaccagtacctgtctgtggcctgttaggaaccaggccaaatagcaggaggtgagcagtgggcaagtgagtgaagcttcatctgtatttacagctgctccccatcactggcattacagcctgagctccacctcctgtcagatccgcggcggcattagattctcacaggatcctgaaccctaccttacgtgaactgtgcatgcgagggatctaggctgtgtgctccttatgagaatctaatgcctgatgatctgtcactatctcccatcacccccagatgggaccgtctagttgcggaaaacaagttcatggctcccactgattctacattatggtgagatgtataattatttcattatatattataatgtaataataatagaaataaagtgcacaggccgggtgcggtggctcatgcctgtaatcccagcactttgggaggccgaggtggtggatcacctgaggtcgggagttcgagaccagcttgaccaacatggagaaaccccatctctactaaaaatacaaaattagccaggcgtggtggcacatgcccgtaatcccagctacttgggaggctgaggcaggagaattgcttgagcccgggaggcggaggctgcagtgagccaagattgcgccattgcactccagcctgggcaacaagagcaaaactctgtctctaaaaataataataataatttttaaaaatagtaataaagtacacaataaatgtaatgtttgaatcatctcaaaatcatttcccccgggtcagtggaaaaactgtcttccacaaaccagtccctggtaccaaaaaggttggggactgctgcctaaagtcattgcactgggagagaggaggagtcagatgatttgaaaatacttttttttttttttttcctgagatggaatcttgctctgtcacccaggctgtggtgcagtggcacaatctcagctcactgcagcctccacctcccagattccagcaattctcctgcctcagcctcccaagtagctgggattacaggtgcccaccacaatgcctggctactttttgtatttttagtagagacggggtttcacatgttggt

SEQ ID NO: 6796 - DNA, 22183 bp, Homo sapiens
  misc_feature (1)...(22183): n = A,T,C or G, or insertion/deletion polymorphism (see Tables 1-2)
ctataacagtcataatcactgacagctgccaggcacttagcacacaccaggcaccaggataagcactttatatgagtcatctcattcaatctttacttggatactctcttctccatttatagctgggaaactgaggctcagagacactagctaacttgccctaagtacacagctagtaagcggtggagctggaacttgaattcaggccttttggatttcaaaatgccttctccaaggactgtagagcaaagtcagagaggctccaaggagaagagtcgatgttagagctgggagctgcccaggacgccaggcatggaagtgaacatgaagggggcgtactctggcaacagagagacccgaccttgaattttggcttggttgcctcgcttgctgctccttaagctctctgaacctcagcttcccctatctaaagtgaggaacaggaaaaaatcctgccttcaaaactatgagaagcacttacctgcaggacagtgcatggaagagcattccaggagggaatagcatgtgcaaagacatgctatggtacaatgagataccaccttactcctataagaatgaccatcattaaaaagtcaaaaaacaatagatcaatgccatggatgtggtaaaaagggaatgcttatgcactgctggtgggaatatgtaaattaatacaacctctatggaaaacagtatagagattccttaaataactaaaagtagatctgccatttaatccagccaaaaacacacatgcacatctatgcttaccgaggcacaattcacaattgcaaagatacgaaatcaatgtaagtgcccactgaccaatgaatggataaagaaaatgtagtatatatacatcatggaataatagctgtaaaaaggaatgaaataatgtcttattacagcaatttggatggagctggaggccattattgtaagtgaagtaactcaggaatggaaaaccaaatgctgtttgttctcagttacaagtgggagctaaaccgtgagtacgcaaaggcattcagaggacacaatggactctggagactcagaaggggaagggtgggagagggagtgggattaaaaaaacctacaaatgaggcacaatgtacgctacttgggtgatgagtgcactaaagtcctagcatttgccacgatgtaattcatctatgtaaacaaaaatcacttgtatccccaaagctattgaaatttaaaacatattttaaataaaataaaaaccaaagcattgtgtatataatgacatttctagtcattaaacatgaaataaaaatgtaaatttaaaccccttccaaaaaataaagtggtaaaattttatggcatgtttgaggacctggaaggatgctagattgtagggttctcaggaaagggagacacgggctggggccaccagacagtcgtgtccagagccttcaggaccaatctaatgactgtcacttcctctccattgtcagttctcattaggtgagaaaacgtgctgatgatttctctgggtctgctttgaaccaaagctgcgttctccatcaatttagcttgggctggcccagattcaggattgacactgtctctagctctggcctcagcgagcatcttagggattctaggttgaggtaggtacctcgcagacccaggttgcctccagaggtgaagtgcttgggctcataggagtagacacagtgaaaatagtggtggggctggagaggatgggagtgaatgaacttaaataccctagagtctatttaggctagcactttatacccattatcccatttaatctttacaaccacccattcggaatgtcaaggcattgagggcagagagctgaagggacttggttccagccacacaagagcaggaggcagagctgtctgtccccagagccttttgggggactgatcttatgtgggattctcagcaggatttccaaggagtggattaaattttctcctggctggagggacatgaaaagtcctaaagcctggctcttgatcatctcctgggcagatgtcccctttcaaagtccctccctccctgacccttgcctggcttcctctctgctcccagcgggcagtgtgctgcacctcacaggttcaattgtcagaacaccccccgagtccgggcacagaggggaaggcagccaatgggaccggacacccagctgggtttggggacctctcctctccttgccagctccacactggtggcctgggtcctcagaacccactgggcccccgctgcaccccaggttctgcctggctcaccttccaccagtagcaccatccccacagccagcacctcgagctccccgaagccrgtgggcarggcactggtctctgccatcctcactctccctcactgccagtggcccagctgtctctggcttcccacagccaggccctcccttttaaagggccatcccatgtgcgtggaggcacatgcaggttattatgttggaccttgggctgtttctggatgcctccccgctgcaaatggtcctcttggcccaagcagaaggaacccattcacgagttggacaatgcagcctttgtgaagccagaatggagccctgtctcattcatttcagccccattgcacaggattaaggtcggggaatccaaatggtgtgtggctgagagcctaatkggaaaagagttgcataaccaggggaggggagcaggaggagggatttgagccgcagctgttcycaacaagcctggtgcctgtgtgtgtgtcctcaggctcacatgagtatactccaaagcgctggggaaaggatgaggcttgggaagtcgcctgctgtcagaggaagaaccccatctgggaccagaaaatggggttggggttctggttctgaatctgccactaactagttatgcgccttggagtgggaccactggactcttccgtttacttttctgcaatgtcaatgtcttttgtctgtggcctttatataagtcctggttagatatcacgaatataaacctcagggctgcatttcctgtctcccatagagcacctgagcataaaaaatgtcctaggacactgtcttagaacagaggggctgcctgccgtcttgtcagtctccgaccccgaacccgcccagccttgccggccccactaagagctttggctgctacaaatgacttcttgatacactggctctttatgcactgttatgctctggctcatgataaaatttacaccaggaaatactgatctaggacaacttagttcattttcagataaagaaaccaagctccagagcactatcagcaacatagctaatattgagtgaggtcaggccctgtgctaggggatcttctgatgagtcctacaacaactccatgagttagataccattatcctttccattttagatgaggaaactgtggctaaaaacagttaagaatctgcctgaggccatgcagtaatttatggatggagctggaacaaaagccgatctcctattcctcaggctcaggcatttttcaatggcatcttctgactcacctggtagagcaacccactctgttccaggaatgcccacttcccaggcctttcctctcatgagtcctcacttacatccaagcctaatccctctgcagggctgagcttatggctgcgccctccagagcgttccctgttctttctcaatttcttttttgtttttttgtttgtttttgagatggagtctcgctctgtcgcccaggctggagtgcaatggcgcaatctcggctcacgcaacctctacctccccagttcaagctattctcctgcctcagcctcccgagtagctgggattacaggcatgtgccaccatgctcggctaattttgtatttttattagagacagggtttctccatgttggtcaggctggtcttgaactcccgacctcaggtgatctgctggccttggactcccaaaatgctgggataacagtcatgagccaccctgcctggccttctgtctcaatttctaccttatggtgttggttaatacatatgtcagtccttttttcatgccttcgagatcacaaaagccttcatgagaggagataaagcagggcaaggccaagattaaagggtaaagttcatttgggcaaaagacacaaggaggaagaagcagagatgtgggaacaggcaagctgacggctgggtttggggaggtggaagtatagctgggaagcactgagaaaatcctactggctgcattggaaggaaggaaagaatgagaagccagtattgttgaaacagacctggctccgagctaggcattttatgtgtgcactggggccccagatatctttgcaggtcatacctcactggtctaggcctgcctggagccacaggcatgaaggactggggaaccttctagaaaagccaaacaacataggtagggcatgctggaccagagaacaatgcctcagggtcaaatgtgaagaatgaatgaatgagtcgactgagtgtctactgctgggaatcatccctggtcagtccccactggcatcttgagtagatatggtggggcgagatagggttaggagagaataagtaaaaattgaaattagtctgggtgcagtggctcaggcctgtaatcccagcactttgggagactgaggtaggaggatcgcttgaggccaggagtttgagaccatcctgggcaacatggcaagaccctgactgcaaaaaataattttttaaaaatagccaaacatggtggtggttgcctgcagttccagctacttgcgaggctgaggcaggaggatggcttgagctcaggagttcggggctacagtgagctatgattacaccattgcactccactctgagtgacagagcaaccctgtccctataaagcaaaacaaagctttatggatggagaatttccaaaggcccttattagaggttggggtcctgtctccaaaaaaacctgaaagtgccttctctaagacctctctgagctacctctctggggccctccttggagtagggcaccttgaggagaggggtgcccttgtcccttatgtggagacatctccacctttggcattcgtagcaatgcccagaagggctcagctgaaatagtagtgtgttgagtccatatccatggggcactcaaggcaggcagctgtttgcctggcagcctgggacagtttgtgggctcatgagagacacctctgatgtctccccaaaatatctgaatctgtccagttcttctgtaagtagggtcttataagtaccagtgaaactgggcacttacaacttgtgagagagcttctgttcccacaggctgtcaaggccttggaatttgagtttgattttcacaaacaccctgcatgaagtaactttatttctctttgtcagataaggacacagaggccaagagataatgtgactcacccaaggtcacagccccttaatggagcagctgggatttgaccccaggaagcctgggtccagagcttagcctccttccaatgcctttagcaccatcaggaagagttgcttcatttcactgcttttttgctatgagacagtgtcacaggaaagaatttccaaaggcccttactgaggcgggggttctttctccatcttccctggcactccagtggggtctgtgttgtccgtggccttgttgggatgggatgctttgcagatgacagtcccatggctgctcgcctctggaaagctgcctacttgtcttgctttgctgtgccctgccctggcctctctgggcctgtggatattgctatggaagggggtcccccgcccctaccctcaggactgagtgattcagaaagcaataagcctctgagtgctgcggctgggactcccctccctaatccccagtctgtccatgtttatccgatggcctcaggagggggtgtaaggggctggcgagcaagtgggcagctgctgagcttgctgggcttgctgggccggtgggacggagcggtccagggacaggcccctgcctgggccagagaggagccaggagccatgagggtggcattaggcatgctctggctcttggcccttgcgtggcccccccaggcccggggcttctgcccctctcaatgcagctgcagcctccatatcatgggtgatggcagcaaggccaggtatggtaccgggtgcgtgggacgggcagcccagcctccattgctttgccagctaggctgggttgggaggagttggagctggggccctgggtgaggtcttcatctcccttggcccttgaggaccagggatcctatggggtggactgtgctgcattgttttccagmaggcaagggggtgactctattcgagaggtaccaggtatctatacacatgggcccgagggtgaggcacaagtatgtcagttctaagaagtccttcctaagtcctcctccaggctcctggtgaagagccctccttaaaggtccaggaaatctcctcccttactgctttttcttctcttttattttttctattccctcttcttttctatatttccccagccccttctttcccaggccacttgcactctcttgcctgacctctctacaatattcaatcatatcccaggcatttcctacaaccccacccatgatgggaccacttgcctctcattctcttcctcctctccatcttcgctggccagatcccaggagcctcagcctcaatacctttttatgagtgctccaaaagccaggagtgcccatcccatgacaagcatgcttccttccatccccagccttttccttgactttccccaccctctgtctgatccctcagagcacctccattctctcctcctctcctttcatgggacattcccatgccactgtggcttgtggacccttgctcttccactactgctcattttcttcttttctttagcaacgtttaaatcatcttttctccaacttctttagcttatccattaatgacctctgcatggtttctgagccactgatggtttctgatcctgggaacaatgttattggagctacccttttaataatcttggcaatgaatgtcgagttgattgggggatgagaggagaatggagaagaaccactaagaaaagacacctcaaatgatctgagaaccagaatgagctccactgtagcccaagtgtccaaggcatcaactcatatgaagtgtaagggtcctgtccccartagaagccaggctgagccctgaacagcctgctgttyccagcctgggcagtgtcactggagtgacaaaaagcctcccaccacccgtagaaggcatagggctgaaagccacacagcatcattgacaaaaccggtcctggaacccaggcattccgattcagttttcagaacacttatctggtgatgctgccatgggcagggaccagtggtaagttccaggcagcagagttaatcttaagatggaaaatgagtttctagggccgctaatgtaagtcagtgggcattcccttctctgaagccagagctcttggttctacccgcctgactatcccatggctaacatgcaccagcccatctgcatggagggtcctatgaggccatgaaaggtggtagcgggccctgaggtcccctgtggctatgggcacagactgtgcagttagaccaaagctcgttctgcatgtcagaagccttcctcagatccctctctaacctgggcctctcagagagcccagcctttatgtctgagctgttgtatcgtgaagtgtgtgcctgtgggcactggggttgcctgggaggagctgggctrtgcatctgaatggatttgtgcccatgctgtttgtcccagtttgcctctggttttaccccacccggagttgtgctggaggtttgagctgtggtgtaggcttgcattgagttcttatggtttcctttaaatgccccttttaccgttttctctcccgttcaagataagttttccaatcacctgtctttctctcacctacatccagaccttcctccttgcaatacccaaacctgtattactttttttgagacagggtcttgctctgtcacccagsctggagtgcagtggcacaatcatagctcactgtagcttccaactcctaggctcaagccaccttcccacctcagccttctgagtagctgggactacaagcatgagctatcacacctgcccgaacctattgtagtatctggaaatatcattgctgtaaatgctctttcttcctgagctagattacacactgtatggagacaggggctatgaggctgattctcttctgaattgctcatcacttagtaagagttccatgtatatttgctcaaaaggagtgagtaagaatatccgtgctgtttgtggacactgtttacaagaaaaaacaagcccagcccagctgcctttaagtggagcatagacttatgctgagggatgctggtgatatgtgtgtgcacctccaggaaagcctgatatcaccagtaggttatgctattacaagagaacaacctcccttagaagggcctgttcagtggctggggggcttaggattttgttttcagtttacgtagtataaaacatagccctgaaatgtaggcttcttgagggcagggactgcctcctattatctctctatcctctgctttagtctcaaacttaatggaataaggtttaagaagtcgtggtttgggtagaagagctgataagactgacccgatctacttgcagtgctgagatgcaaacattgatgacagtgatccatacccttgggctcatgcagggtggcaggcaatgtgctgggcttccacatgcattacctcatttaaaccccataaccaccttgtggggtctatttgatggcaaaactgaggaaaagagaggttacctaatgtactcaaggacacacarccagcaagcaaagagcccaggtgtgaatccagctgtggggctgccaagtcctggctcttaaacaacttgatcatcgatcgcatggctccgcagaggtgggagagacttgaggtggtttcatttttgatgtccttggtatattttttgttaaacgataaaccaaaacagttacaaaaattgaggtataatttaacaaacgaacactttttttttttttttgagacagtcttgctgtgtcacccaggctggagtgcagtggggtgatctcggctcactgcaacctctgcctcccaggttcaagcgattgtcccgcctcagcctcccgagtagctgggactacaggggtgcaccacaatgcctggctaatttttgtattttttagtagagacaaggtttcaccatgttggccaggctaatcttgaactcctgacctcaggtgatccacccgcctccacctcccaaagtgctgggattacaggcgtgagccactgtgcccggccaaacgaacacttctaacrcatatttgcaaagcaacagtgcacaacgcgatcatggggtttattaatgctgttcattcttagtgcactgtgggtgctgcgggctgttatgggtcgtaacagtgtaagggtggggtcttgcmggaccgtgaagaccaaatcaccttcctgggaccattgtgaaaggctctgagagcaagacctctgcaaagggaaaagtaggtctgcttactccgggcccctctccaggtccccgtcatggcttggactctggtgtgggtgtccggtgataacaggcagaactggaggcctcgcgaagggargtagcrgtgggagatcccagacccggcaggatccttgctcaactatccctcatttctgccagcaggacagtagtgtgcaacgaccccgacatgaccctgcccccggcgtccatccccccggacacctccagactgcgcctggagcggacggccatacgcagggttcctggcgaggccttcaggcccctgggccgcctggagcagctgtggctgccttacaacgccctcagcgagctcaacgccctcatgctgcggggyctgcgacgcctgcgggagctgcggctgcccgggaaccgcctggccgccttcccctgggcggcgctcagggacgcccccaagctgcggctgctggacctgcaggccaaccgcctctcggctgtgcccgctgaggccgcgcgcttcmtggagaacctcaccttcctcgacctctccagcaaccagctgatgaggctcccgcaggagctcatcgtctcctgggctcacctggagaccggtatctttcctcccggccaccaccccaggcgggtcctaggtaagggkcggcaaccttcacctggggtcttaggcaagttaccacgcttccctgagtttcgattatttggaaaattgaaatcataccttccttccaggtttgagcaaagacagtgagatccacaagagcggcgggtttaggagctcaatccacaagccagactgtggcagttcatatcgcagtcataagagaggtctttccaggtcatacaaccaggagaaggcccctgagactcaatttcccaactcagagctgaatgggttagtacactacaccagctggacctgctattttttcggttccttcctgttcttaacaaaccaacagcttaccatgtgaaccagatctttcctgcccaaggcacctgcctggtcctgagaatgacagaaggggcataattcattctggaaaattgatttgaattatacaactcatacatgaataaatacaaatgtttaaaatattgcagaagaggttaaagacccttctgtcctctctccctattccaaccccttcccaaaagtagttactattatcatatttatatgcaagctccctatctgttcagatacatttcatatgcatatgtatatacatatacacacatacatacatggattcagaaaagttatgtgtatgttttacataaaattttgtcatacatactaaccaacgctaactttttgacccaacactatatctcgtagatctttctaaattactacaaatggatcaagtttatttttaaaactactgcacaatattctatagtatactatatctgcactatgttataaacatatttatactatagtttatttagccattccccctttaatggacttttacattgtttccattatttggtaacacctatgatgcaacagagaacattcttggcaatacattcctttttttttttttgagacggagtcttgctctgtcgcccaggatggagtccagtggcacgacctcggctcactgcaagctctgcctcccgggttcacaccattctcctgcctcagcctcccgagtagctgggactacaggcgcctgccaccacgcctggctaattttttgtatatttagtagagacggggtttcaccatgttagccaggatggtctcgatctcctgacctcgtgatccacccacctcggcctcccaaagtgctggggattacaggtgtgagcgcaccgcacccggccggcaatacgttcttgcgcacatcaatgttgcgtatacgatacgaactgacnnnnnnnnnnnnnnnnnnnnatgcagttgtgtaagtatatcgaagcggtggggtaccgacgcgtaccttccaccccgtggtgaagaagcaatacgttcttgtgcacatcaatgtttctctaggataggaactgagaagtggagttatcaggtcacagagtgtgcatattagacatttaaaaacccatctgggccgggtacgggggctcacacctgtaaccccagcactttgggaggccgagacgggtggatcacttgcagtcaggagtttgagaccagtctggccaatatggtgaaactctgtctctactaaaaatacaaaaattagctggatgtggtggtgggcacctgtaatcccacttacttgggcggctgaggcaggagaatcacttgaacccagaaggcggaggttgcagtgagccaaggttgctccactgcactccagcctgggcaatgagtgagactccatatttttgaatgccttccaattctaggtgctgggaatacagcagagaacaaaagaggtgaaaacgtatacactcatggaactaacaattaaaatggccaaaatgtttaacttttgtcagtctggcaagtgaaagtttcactgttgtttaactttgccttttacattcattctttctggccctattgtgataaaacgaaagccaggtagctcaccactggagccaggcattgatgaatcttgggttgcagatgtatcattaagtgcgtttaaccaatgacacaaggcagcaaccactggtgagatggggtgagggggaggtgggaaaaggaactggcacccgtgggttgtgctcaaagagacctgagagacatgaatatacaatcagatctgaatgcacccaccccaaccctgtgatgcacgtattaaatatatctgtgtgaatgtataagatatcattgattattagatatactattaaattcaataagtctttggggactaaaagaacatcatatcaagtgtatttatcttgcatttcagtaatgcaaccctataagaaggaattgtgccttagaattgaggacacatagtacccctcatttatatgcacatggtacccctccatctctataatgttctttgacagagtgggtacagtgatctgctttcrgctctgtaagaatgttcaattttagagtaaagacagtaggggatatagcctaggatttgattttctggccctgtcaccctgctgtttacgcccatttaagcctatgtcaaagggaccatggctcagagcagccaccttcattgccgggatgatgctgaaaataccatttatactgggagaactggcatcaaggatcaggggtcagtgatgcatttctggaaatggattttgtcatattgcaattattgtggaaatactgcctggccagtggcctgaaaggatcagtccaagaatggcaacagtaattgccggttttgtcagtatgctgtatatctacccggtacttaatatgatttatttctgattatgcttaaagcaaccctgaaaagaaagtaatgctactatttaacacagaaaaatcaaatttcaggtcatactactagcaaggcaaggagctgggtccagaggccagttctgctgactctgaatgaggacctgcctgtccttccagaggggaaggggtgctgggcctgaggacgttgagtatctatctgaatatcttgtcttcttttttacycctgcagggctacaggacaacccctgggcatgtgactgccgactctatgacctggttcatcttttggatggctgggccccaaacttggccttcattgagactgaactgagatgtgccagcccacgtagcctggccggagtggccttcagccagcttgaactgaggaagtgccagggcccagagctycatcmaggagtggccagcatcaggtcccttttgggtggcacagcaytgctacgctgtggagctactggagtccctgggcccgagatgagctggaggagggccaatggcaggccccttaayggtacaggtatgtgagctacagggatgctgcactgagaacctagactggggagggcaaagcagctccccaaatggggatttggcagggccagagggaagttgtctaagcaaagctgggyttccacctgtctgagttgagtttgacrggggcttcccagaggtgagrcaaatcactgtgacaacagattcaacaatgacagtggctcttgacctgtcctatcatatcccaccagacactctatagagacttggggcccaccctgagagaacaaaaagctgactttttggtggaagaccctcttttagtgtgttaatatttataataaatttcccagttgtaaatattaaaccagaattacctggagtaattaatgatgtgagctaccatctatcgagctcttcatgtgggtctagcacagtgctaagtgtattatgcacataatgacattgaacttcaaagagcaacccaattttccttcttattttgcatataagtaagctgaggctctgagaggctaaatgctacattacacagctcatacatggaggagctggggttccagcacaatctagctggatcacctttgcaaaattccagggcccttaagaacatagtgggttggctgggggctcacacccaatcctagcactttgggaggctgaggcaggaggattgctggagtctaggagttaccagcatgggcaccatagtgagaccttgtcgcaaaaaaaaaatatatatatatattcytaggcttggtggcatgtgcctgtggtcccagctactcaggagctgaggtgggaggatcacttgagcctgggagttccaggctggagtaagccatggtcacaccgctgcactccagcctgggtgacagagcaagacactgtctgaaaaaagcaaacaataacaaaaaaacccatagtgtgaacttgtcagatttagaaggcatcattcttaggctctgcctcagcctggggctccagaggctcaccacatttgagtccaaggtaatgttgatacccttggctggtctaagaaacactgagtgactgccagtgttttcttacgatgacacctgagtgtgtaccacctggggctgtgaacttggccctgaaaggcagcttggggcagatgggcccattcgttctcccacacatgcctgttttcctcctagtgcaccaggaagtctccagtgacggcacgagctggactctgctgggcctgcctgcagtgtcccaccttgactccggagactacatctgccaagccaagaacttcctgggagcctctgaaactgttatctccttgattgtcactgagccrccgacttccacagaacacagtgggagcccaggrgcactatgggcaaggacaggtggcggaggggaagctgctgcttacaacaacaagctggtggccaggcatgtcccccagattcccaaamccgctgtcctggccactggaccctctgtgcccagcacaaaggaggagctgacccttgagcacttccagatggatgccctgggagagctctctgatgggcgggcaggaccctcagaggcacgaatggtgaggtctgtgaaggtggtgggggacacttaccacagcgtgtccttggtgtggaaggcaccccaggctaagaacacaactgccttcagtgtcctctacgcggtctttgggcagcacagcatgcggygggtgattgtgcagcctgggaagaccagagtgaccatcactgggctgttgcccaagaccaagtatgtggcgtgtgtctgtgtgcagggcctggtgccccggaaggagcagtgtgttattttctccaccaatgaagtggtggatgctgagaacactcagcagcttatcaatgtggtggtgatcagtgtggccatcgtcattgccctgcctctcacgctgcttgtctgctgcagtgctcttcagaagcgctgccgaaagtgcttcaacaaggactccactgaggccacagttacctacgtcaacctagagagactgggctacagcgaggacggcttggaggagctgtcccggcacrgtgtcagcgaggctgacaggcttctctcagctcgttccagtgtggactttcaggcctttggagtcaaagggggcaggagaatcaatgagtacttctgctgagggatatgcctccgcaactcacamacctgcctgcccacgctccttctttagytctgacacctgagtacrcgatcacccactcttacctgctcgggtacctgcttactcagatacttacacacaacaacagcagcagcagctgctactgcaacaaccgctaacacttgttaagcacttactacagactagaaagtgttctaagtgctaaattcttgtaacaatcatttgcagcaggcatcactattctctccatttccctggggtggggggttaagaaacttgcctgtatcagtcagcttttgctgtataacaaatgaaagcaaaatcttggtgatgtatagcagtgaacacttattttcacactcacaggcctgtgggttgattagggtggctctgctctgtgtgtttcatttggagcctgggctggagagtagcagtgggtacctrgggcaggtttctctcgtggtgaggttgaatgataatagaggaatgattgttcatgcaatgcctgttatgttcttagttcagaactggtatactgccacttctgtccatattctatctgccaaagcaagtctcatggccaaacccaagtttgayggggcaagtaaggacacttctcccctggaggtgatggtagagcaaggaatatgtgctgaacagtgatttaatctgcattgcccaggattacacagctaggcaaatttagatggctctgagatttggaccacacagttgggatccacggttaaaagtccttaccatcctcctatactgcaccttgattacatttatgctaattcataggcactcacacacaccatctctctatgcattagccatattggtagttacccatcctcactaacacacacactacactcataacccactgtgccctcagtgaattctaatatttattctctgggtgctattctgcctagagacaatcatttgatttttcgataaatgctagagtttgagacaatgcccaagagaacattgctcatttgctttcagaatgtcaggctggagggatccaagagacctcattacactctgtgctgtctggcacattcacctctgtcccatgcagcagcctttgtgattcttaccaaaacctacctgggttcttgagggtgtctcggagccttcctggttgctcatcaagttacttcaaaggaaaattgctgtttgctttttcttggagctaggaaaccactgagatgttgtctctgtgcactggggaaagtgaatgttcccagcagaaggctcaatttgttccttatttataaagccgatctctggcatgaggagcatccagggtacctgtgccaagtcctttgggtaacaactgaagaaattttgggacagcaagtgatccaagaaaattgttttgctagtattatgcaagagactccaagtatttgtaagtattatgtcatgtgatttattagacataagccagtgtgatgcagtgcttcttactcccctcacatttacaaaagaccttacaacatatttcactcagttttctcacatttgatattcatgacaacccactatggaggctgggctgtttgattttacagaagaagaccaaagaggtgaatgatttatacaaggaagtgatgaattctctttcagaatctagttctttgacaactttctcatcaggctgatggtctttattcagtatccatccctgcaatgtggtctacagaaggttcactatagaaatcaactttttaaaaatcactgaaacctgggatcagaaccatgagagcacccatgcacatgagcatggaatttccattcttggatatcttctgccaccacctggagggtgcacctgactataacttgtggaccatagacattggtaagagaggctgttttgttgtaagatgacaaagacactgtgtacattgggagccagcaaacttttttcctgtaaagaaaggcaaatagtaaatattttaggctctgttgctactacttaactctgctgatgggatgcaaaagcagccatagacaatatgtaaattagtgggtatggatgtcttccaataagacactttttacaaaaacaggtgacaggctgggtttgaccctgagattgtagtttgtttaccccttatgaaaatttagaaagatatttctggtgagttttggagacccaagactcaattctgactctttgataaatgagagtgatagacacccccaaaattaggacaaatgtaaatgcagtagatgaaagcagtcatctgttgaagtgatcaggatgttgcctttaaatgatggtctgaaccaatcatgatgggacagttattgacctaaagacaagtaacatttagccagttttattgagtcttgtttgaagaaaaatcaggaacttaaaagcaagaaatctgtagtatttatctgatgttaacagagacagaaagagagagagagaattcaatcttgccaatgatccaatggtttattgggacctattttcatggtctggatggaaaggcctctgatatggtttgactgtgtccccacccaaatctcaccttgaattgtaataacccccatgaatcaagggtggggccaggtggagatcattgaatcacgggggcagtttcccccatactgttctcgtggtaatgaataagtcgcatgagatttgatggttttataaatggaagtacccctgcacaaatccttttgcctgatgtcatgtaagacatgccttcgctcctccttgccttctgccatgattgtgaggtctgcccagccatgtggaactgtgagtccactaaacctctttttctttataaattacccagtcttgggtatgtgtttaccagcagtgtgaaaatggactaatacagcctccaagatgataagcctcccaaaactcatctgtcaaccttcctttgtgtatcctgtcttccctggtttgcccttgtagagaagaatcatcctggattacgctcatgaatattcaagtcatgggaagaaacacattcttattgtaaaaaataaaatgatgtctggcttaccttagtcttttagtatgtgagtctgatgagtatgagttagtccctgaaaattgaatgccctctgagtatcctggcaaaagaatttctggccttccaatgctgaagaccaatttgggccatggcgaggctgcagcatagctggccttggaagcctggtttgtaggttggttggaatcatagcatcttcatgatgtcttttgatgactgcaacatggttttattcctcatgattaagcagagaatatgtccaaggtcacttgcccattgaagttgctgggtacaaaaaggcaaatacagaaattgtgctctggaaagtggatgtgggctatcaaacctaggctatcaatcgagggattcagtgagcagtttgtctagaggacaagagctggaaatttttgtcttaattatcatataatctaacaaaggcaaaaatcaacatacaagtacctgagcatatttattcacaagggcattgtagttaggataggttagatttatgcttaggcaaccattcccaaatttccatggcttaacacggaaaaatgtattcctgttccacagactctacttaagtttgggaaatacagaaggagggagggctctgcttcactaatttactcaaggacatggctgggaagactccaccatttggaatgtcagtggttgccacaacaaggaaaaagataaattggaagatcatgttagggcttttcaaacctcatttcttgtaacatttcattagctagatcaagagtcttgtagcccacctatttcaaggaggcttggaaaggtcttttgtgtctctgccacaggcatacctaagagcgtgggtagctgaggcagcatctcagacatgctggcagcagacgatgggggtgggaaagagtcctagcttcagagaaacggagtacagcgtgtctgctccctgataggatgccctgttctctgtctgaggtagcccagtgttttactaatattgggaaggtgagtggcattttccaattgaatagataggacactctcctattaagattctattaagacaagccagggagctgcctccctgcagccatttatatctaagcatttcacaaacacagagtaattcctcccccatgactctgtctctatggagaattttaagaccctagttctgaaaagcatcctgcaagagggaagatgggttgtaatatttccagaccctcttgccattgttgttagggtctcttgagtttagggactacactgaaccacaggttgtttaacataaataacttgacccatgctaacttcaattatcctggtctcctgcctcaatttccaagagagccactccctctgttcatatgccaaataaggaaaccagagaatgagggggtcaggaaaggagtggggggcagtagagaagtggcctagatgattctagagatagcatgccagtgggtgtgcttcacaagcttcccgcaaacttcttgaaagttggatggagctggattcatttgaaaaggctggcatgagatggacagagaggaaattgtgggggaatggaggactcttaagatctttatcctttggggtaaggggagagaaaggaatccactagtggtttggaatagtcatgaattaaatcacatatttccatgaaacaagcctgacaaagccttagcaaagctggtaggggactctggagtgataattgctcatcagagttttcccccatcagggcaaactggccaggccctcaccaccctcagtcactgaatgtgggatgtggctgctttgggaaggacgtgacctcatgcaagcactccttgcagctgagcatccacttataccttgaagggggatctaggaagcacatagccatatgtatgacaaactttgtgccgatagctctctctttgttttggatttttacctttagacaaacccagtggtccccccaggttttagagttagactgtttggaaactcctgcaaatatttctggcttggatggaaagcctggagtgtaatcagcttagctggtgacccatttcccccctcactggttagctaagcggattttctttsctgaggccttttgtagggtacaatgtatatcrtgagtcttaaaggaactcatggaatttcaatattcaactggaagtgccctagttaatagagatgtagacttttcggatcttaaagagtttgtcagtgggaggaggattaatgggcaccaactgtgtgctaggtgttgtatttaacataatctcaaacttttctaaaaatatggctggatgcaatggcttgcacctgtaatcccagttacttgggaggctgagaagtttgagaccagcctgggcaacagagtgagaccctgtctctgaaaaaatacaaaaattaaaaaataatgagaaataaattcctggaaacactatgaggtatttgttaatattctcatgatacagaaaagactcacagagattaaattacattccaaagatctcaagattcagaagcacaaacaagagagaagactccttgggacagggtctataataggtttgcccttgaccctgttcctttcattgggcaagagtatagcttaaagcaaatgaccagtaaatatttgtggaataaatgaagagtgaaagagcaagcatataaaattgtatacatctctttttaaaatgtaggttgcccattttgatgaagtgaaatgcacagtattaaggaaaggttgtgaagtccaagaaaacaatcttttggtttaatcagaaaataccatcttgtatttgaaactggtgacccaagctgcagaagcagctgtcttgatgcagtaggagcatgactacaccacccgtggtgttgggaagagaacaaatgataggaatgaacacagaattactttgttactcatcacctattttcactttgagaaaatgattggaaattctaggtttcaggaatcaactgcaaatgatgaagcattagatggattctggccacatcccctgaacagtggtgctcagaatagcactgcctgcttgtttctcagacttctgtttaagactctaagaaatgtagaatctgtatggaattggacatctgacttggagtttgcttttcagactcaagaattacacaaatgttgaatttcctgaccctagttaagagacattgatcccccttcgtgtgttctgactgaacttgtggtctgggctgtaacagacctcagagctcccatgggctttcctgctgctgtgtgacttacatcatcatggattaccaataataggatttgccactcrgaagctggggcgatacttattcaaaactcacaacgtattttcttacagagaaatatggcttcagtttttcattacttcctgttagttctggtctttctggatacacacgcagctcagcctttctgtctgccaggatgcacttgctcagaggagagtr

SEQ ID NO: 6797 - DNA, 43994 bp, Homo sapiens
ggaatgagtaaaaattgtcactttctggcaggttcaagaaccttattataagcaaaatccaaaggctgctttggtttggtttcctagcctcaagaggttctaaaatctaagacctcctacatcatcaacgggagagaaaaattatgcttctaaggaaagcaaagttacacctgtttttagattttaaccctgtacattgtcttcaagtccttgttatctgcctgtggactgaactagatcctgaattctcctaagttcctccaatattaggttataacagtcctgatggagtcccccaaccctcttgcctcgatcctgactagggatgctccagggacattcaggtgacttccccttcttaaaaatctgaccagctagggacattagataccagaattgggaacaaactggatccataagatactatggtcagtaatgagatcttattggtcagtgactttttttttttttttaaatggagtctcactctgtcacccagagtggagtgcagtggcatgatctcagctcgctacaacctcccatctcccgagttcaagtgattctcatgcctcagcccctcaattagctggggttacaggcatgtgccaccacacctggctaatttttgtatttttagtagagattgggttttgccgtgtgggccagactggcctctggcctcgaactcctgacctcaggtgatccacctgcctcggcctcccaaagtgttgagattacaggcatgagccactgcacctggcctgctcagtgacttctaacattgctgctgtacctgggtaaatacttccagtcatatttaagcgggcttggagttggcaaaatctctgagagagacatcttcggaaagcctccatgctggacttagtggataaagtttccaatgtccagatattttcagctggtttctccttggtataggatttcttctgcattctaccctgcacatcttaatgataaccctcatattttggctaagcatttgactcccctttagaattgttctaacttgtttttaacagatgtctacaagagattcccaccaggatcctgcccatgcaatctttgagactttaaactcactccagctggaaataggaaccaacttaacccaagagactttggttcacatttaaccagtactttcctgaatgcctctcctaagtaaatggctctagtttctctattggccactgcactgccactaggattcctgcaagggatccgatgggcccagagcaggtagccaaccacttctctgttggatggaatgcaatgctgtttgccagcatgtttgagccagtccttcaagatggattctgagtgactaactggacctaaatttaaatagcacaaagcagccatttgctaactagatttcatacaaatgctctgagttcctggaaaacccacactccttaactttgggactttcaagactcacctaaatcaatcaattaaagctcacttgtgtcagctaatcagggatcagctgtattgactaatgaaaactaagcgagtttcaaattttaaccatttatttgtgtagaagacttgattgggagcctgggtatgaatacttgctataaaatctgagcattccctttgttctctggagcaaacaatgttaagttgttaactctctgtacctttctctagaactggatggaaacaactccatctgaaatgcagccctaataccagggaactcctacagtaaagcgctaaacaactttattactctaaccaacgtttatgtccctaatcagcaagaagtagttagaatggtcatcatccctttccctcaagattgaggaatggacataaaaaggaggggatttgtaactgctccagactgatctgttgtcagaaaggggctcttgaaccagaccatgaaagagggttcttggatctcctgcaggaaggaattcaaggagagtcacagagtgtagagagaatagacagtttattgaaagctactcagttacagagtagggcatcctccaaaagyaggaggaggaatgtgctgtctttgttttaaactcttcttttataggggtttaatctatgtaaaacctaagctatgtctacatgtgggtaggctgtcagtgtgacaaaatttagtattttgttgatataaagaaacttatccttgtcatcttagtgcataagtacatcaaagtatgactttagctaccttaaaagcatgtattgttatgtgatattgggacatctggacattctgctgtcgtaggagtttgtccttgcagcattactaaatcgcttccttagctgtaaacatcttataatcgtaggtcataactgtcaaggaagtgccttgctagtttttagatggagttgattttaaaatagtgtcactctggctttcctatgctcctgctttcctaacaaatctggttcaacttttttttttttattcaacataatcttttttttccatactacctcatttacagagtgcttcctatagatatggttggtctgtatgtttcctttttcagctttgattcttatttttttgaatcacacatgctttatgggggcttccactaccatgagccatattttctgtattaccagcaagatgtttgggtttgttttttgttttctttatatttcaaattttattttagatttaggaagtacgtgtgcaggtttgttaacatgggtgtattgcatgacgctgatcttacaataccaatgatcccatcactcaggtagtgagcataatatccaataggtagtttttcagaacttgccttatcttccctctctccctgctctcttaattcgaagcctatttttcctatctttatgtccacatgtttccagcatttagctcccacttatacgtgagagtatgtggtatttgtttttctgtgtctgcattaatttacttaggatgatggcttccagctgcatcttttgttgcaaaggacatgactttgttcttttttatgactgtgtagtattccatggtgtatatgtaccacattttctttatccagaacactgttgataggcatctacattgattccatgtcttggctattgtgaatagtgcagcaataaacatgcatggttcaacttttatggtaacaaagctgtgagttgttcttcagttgtcatggaccctcactcaggtcatgtaacctgagcatggacaggtgaaacaagtgtgcaaccacaagggaaacctaatcgttcagactgaggtacagggaccgaattaagaggtggacacaggatggcaggatccaggatccaactggatagaactcaggcatcacttcatggcaggatccagtcagatcttgcctcccagcatcacctcattgcaagatccaatcagattattcctcactaccctatgcttataaaacctgacccacctcccagcttggcgaggtactactttgggagctttgtccagtgttctctttactttctgtaagaacaaaatctccttgctaaatccaccttgtcggtggtcattgggttgatacctgccaagtgactgaacccacctgttgtgtgggtaacatttagaacatattttccatttctttattttccttgactgtctgcattggtgtctgtgcaccagataaaacagcttcctttccagtcttcacagacaggtctcagataggacaacacctttaccaatcagtccagacagaggttctgggtgccacttaaaccttcctggtagttgaaaccacaatgtttgttcttaatggtcctcaggcatctagagtatgccaggcccttccagtgctctcagatacatgagataaaatccagttcctcaggtagcagccagaaaagctggggtgctagttatttggtctgtctcctttgcttttcagagagaagctggaagccaggctttatcactgcactgagccaaagtggggagcagggggaagtgcccacatgcttattaaaaaccgctctgaaaatatttgaagtaacagggctataacaattattattttaaaagcaactgctgttttggtttgtgtagccccagaggtttagcagatgctgggccctgtcagctcaccaaaacagggaaattagaaaccagtctatctggtagtatctagagaagttgtgataccagataggtggtccaaacccttcactcctcagggatagactaagagatgggagttccttcccgatcatatggcattgtattagggttgggggttatgatcacagtgtgtgcaagttttttcctatcagttttgatgtggatagtttcacactcacctagggtgcaggagtggctcagtcagtttctggatttccaatgatgggaatttgcctctgtgttgctgttgaattgatggtggggaaggagagtttagggccttctattctgccatctgtgactctgacagtttcttttaatgttaaactatcatacagtctagttactacatttgtagacatttctctcgcacaaatgacaacttatatttacacaaaagcctgtatataaaatgtgcataacagctttattcataatagtcaaaacttgtaaacaactgtatgtctcacaatgggtgaaaaattaagtaaattctgttataggcatacagtggattactactcagcaataaaaaggaatgggctattgatacatataacaacttccttgaatctcaaagtacttaggctaagtaagaaaagccaattactgaagatcgcattctgtgtgatttaatttacgtaacattattgaaatgacaaaatggtatagatagagaatgagggttatggatgggtgagtggagaagaaggggcagtatggagaaagggtggtgtggctctccgtcktgatggaagagtttcgtttcctcattgtatcaatggcattatcttagtcgtgatattatagtgtagttttttagatgttaccattgggagaaactgagtaaagaagatgtgggatctttctttagtatttcttagaactgcatgtgaatctacaactagctcaaaataaaaagtttaattataaaataaaagctacatgaaatgaagcaaaaaataattcacccttgtcacgcacacagagtcagagactgtaacataatttgcaggatctagagcagaatacaaatgtaaaacatcttgttaaaaaattattaataattttgagacattgataaagcattaagccgcctgtggggccctttaagcatgataaactgtgctaccacacagattgcacattcacgtatctggccctgcaaatggaatgatttttgcccatgatcaattcaccatggcctctttgggctcagtgaatttgcttcttcaggagggtaattttctcttctttctctgctaagctgtttaacagtagttgccctgcctaatgggcttcatccatccatttctctcagattattttcatgatgcactaggatgaagcacaccctttctcctagtcttgaggaaacgtcgatattcagaatatttaaacgcaggcactgaccaatcagaagagtttctggccaacgttccacacttgagggaaatgacattatctgagccctgaagaaaaacgttgtagatattctccagatcaaagcatcgacaggaagattttagatgttgaagttcgtaatatttcctaaagcaggtatgaattactagtaacttaataggtatattaactgatgaagttttcatttctcagaacaaaccagtcaaggaaggtgctattatactccttttattcatatagatcttgaggctgagacagtttaatcaatatgctataattattgtgtaataataaattaccataaactaggggtgctatgatctcaatatttgtatctcccactcccaaattcacatgttgaaatcctgactcccaaggtgatggcattaggagatgaaacctttgtgaggtcattaagtcatgagggtagaataccgatgaatgggattagtgcccttacaaaaggggcccaccaaagctgccttgttccttctactatgtgaggacacatctagaagttaccatcaatgaaccagaaagtgggccctcaccaggcaccaaatctgccagcactctgatcttggacttccagcctcctgaactgtgagaaataaatttctgttgtttataagttacccattttatggtattttgttacaggcacatgaactaagacaagtggattaaaaacaacacaaattattattttactgtctagaaatgagaggttcaaaatggctaaagtcagggtgccactgatagggctgcatttcttttggaggctctagggaagaagccgtttccttgcctttttcagcttccagaggccacctgcattccttagcttatggtcccttgctacagctttaaagccagcagcacagcaccttcaaatctctctctgacagtgacattcctgccttcccctaataaagacccatgtgattagattaggcccacctggattatccaaaataatccctctgtctttagacccttaaccatatgtgcaaaatgtcttttgtcatgtaaaataacatccttacctcaaggttttgggaattagcttattaatgtctttagggggtcattattctgctttccacatacatttaaaattaactatcaggctacaaaagtcatatatgaattgagcttgttttgccccaaaggctgtgttctttttttattttttttatttttattttttgagatggactctcactgttgcccaggcaggagtgcagtggcacaatctcggctcactgcaacctccgcctcctgggttcaagtgattctccagcctcagcctcccaagtagttgggattacaggtgcgcaccaccacgcccagctagtttttgtatttttagtagagacaaggttttgccatgttggccaggctggtctccaactccggacctgaggtgatccacctgcctcggcctcccaaagtgctgggattataggtgtgagccaccacaccctgccagctgtgttcttttacatcataatacactgccttttatatccctcacttattcaatatcattaccatccatcatgctgtcacaaacacaaaaacccaagaaaagtgggatacaggtcattgagaataaataatttttataaacttttgttctttcttgtaactttttatcagtcagctattccaatgaagcaaaatctgataatatattgcttttatactacttagttgagacactcacatctattgaagagtaatgggcactttgaaggggcttttttctttccttttatatccggtcaattagtcattaatttctgccttctaatatagactcaactaaaaaattatattttgaaaaaaatttattttctaaatgaaattaaaattactctgtatgtgtacttcttttcctcacactggaattctctaaggacagtgtaaatgcacatcactgtatcttatgtgtggtatcttatgtgtggtatcagctatttaacacaaggttgcataagaaagtaagcacgacgatatggcttagaagtcatgagattcacatagtttaatataaagctcttgtgataattggagagttattttgtcacatttctcctttcataatttatgctccagctctctcagatttcaggtgttttcccaactctgagatatattctcttctctctgggcctaactaaagaaactagaagactttcttcaactggaagacttcttcctccacctcaaatgcctcactttattttttttaattaattaattwatttatttatttattgttttgagacggagtctcgctgtttcgcccaggctggactgcaatggcactatctcggctcactgcaagctctgcctcctgggttcatgccattctcctgcctcagcctcccgaatagctgggaccacaggcgcctgccacygtgcccggctaattttttgtatttttagtagagacagggtttcactgtgttagccaggatgtatgtatttatttattttgagacagagtctcactctgtcgcccacgtggtgcaaccttggctcactgcaacctctgcctctaggattcaagcaattctcctgcctcagcctcccaagtagctaggactacaggtgcaagccaccatgcccagctaatttttgtatttttagtagagataggatttcaccatgttggtcaggctgatcttgaactcctgacctcaggtgatccacccgccttggcctcccaaagtgctgggattgcaggtataagccaccatgcctggcctaaatgcctcactttatttaactaactccagctcatttgattggtactttcttgggaaaacttcttctgggttaagtgccctcattaactgctctcctaataaattattctactgccattcacatcttgttacaataagtcatgtatacctacttatttttcagtttcatattaacttccttaaagaaagggacattaccctcaaagtccacctggcgtgctggctgaaagatgttaagtttgaaaatatttgttaaagggtaaatgattatgtacatctttaggacttcatgaacttactttcagtttagtttccacataaggagaaacttacagcaacgtagaaaccaagagattgatatgaataaatgatgtgactaactcacaaataccatgtcatttgatatttgacctttaaagtagttttcatatcagatctgtcagtcatgggttctatagcttactgtgaacttagacatattagttagtccctcacccaaaatcatctgaaaaataaaggtaatatcagcctcattagttagttatgccaattaaataagaacacatatttaaatctcatattaatgtgtatggagcatagtaagcagtaataacctggcatgttgtcatgccaggctagtaacagtaaaagtaatagtagtttcactggaaggtccaagattagtgtggaaawtccaagatgattagtgtggaaattccaagataagtgtggaaatttcaatttatcagggtttaccttttgtcccctttaagctaacaatgaaattataaaaggatataaaagggataagcctgacagttcatatccacttctgtgtatgataatataactggagagacatcaaactcatgctgagaacaactagaagagttagaattgaagaaaaaggatttcattaagatattagagagtgttcaaggcaactggaggcagaacgaagattctggaaaggggccacagagaagtgagtcagcattccaggagccacccttctcttaggggcatcttggcagtgggtcagatgctgagattctggggagagggctgtggataccaggcatttttttgggggagagaaaaatctcttcctaaagcacttgaaggaccaaaacccccagagaggagagagggccaaagaaatgagaaaaatttttctctcaagcaattttcaaattattaaatttcacaggaaaggaggttaggaagaactatgtgaaaaacagacttgaacttttggcaatcacatgttgttcaggagacaaaaccaaattcaayttccaagaaagagaagcagctttgataaaaagcaggttctcagatggaattactagaaggctttatcataggtcctaggacaaactagaaatgatgaaatagtaaagaaaaagatatataaaatcttacagaaactggaactcagtcctaatgcaacttcatttctatttgataaaggcaatagctgtccaatctggaacttatttcttacaggtaaggggggctactgtatagaattcaaaagcagggaaaatatgttgtcagagttaagatagagattgtatttggggtaatgagcgttgcaggacatgagtagggcacatagcgtgttggtattgttttacgtggttttaagatatacttcatctaggcacttgttacatgttatatttttaatgaatgtstttagttgtatgcttatgatttgtgcacattactataaattatattttagtaaaaggtgcccttactggcatttatatacaagaaatcaacacatctgacaagaagctcttgctgctaaagagcctctgtgctcctggatcatgccagagggagcacagaagctgcacaccgttcaagcccatttttgaaaagttgttrtagcagccatagcagcaaattcccaaaatatcttgaagaaattgaaaacaagatattttttgaatgagcgtaaactcttgggaatgaattttaatttgagattaaaattgctgttgtctttacttacctaacattcatttcctctgagagccaactccttcctttcaataaattcttattttctatcataatattgctttgtaccgcacaaaatacaattataatttttaatagtcaaagaaattttaagttatcaarcattagtttctttcgtaaccaaaatactgttagagaagtagcttcaactttttaaaattcttacaaacaccagtttattctgttgtgatgagctgatttttgaaacaatttatgcttcatttgttcctctagctatatttaacttaaaggcttgacattttgagttactggggcggttacacacttacacgttttagtcgttgggctttttttttgttttgttttgaatcattcttggggttgaaaacgtagagactgtggtttagatcactcatagaaactggaggcaaaatgcatgacagtaacaatgtggagaaagacattacaccatctgaattgcctgcaaasccaggtaagaagctgggctctacagagtaagtgtgaggactggaatgggaaggtagtggtagtgatgggctcacacaggaaaggtgctgatctagtaaaaagttttcaaggataagagatggaatgtgggagtccataaattggcttataatttgtgtaaaacatgcatatatttatattcccagttctaacaactaaggagagggaacaatgagagaaagatgtaagacaatgagataaggttaagtttaggattgaaaataacagttaatttcactaaaaaaaaatctatacaaactctaaagtgttactcagatacaagataccatcattattacataggtagaaaacctatcatggaagctcttaagagagaaaaggtagaaaatagtatgtaaaggacatttacaaatcaaaaaagtaacaaaggttgagtagaaacttagtagggcattctaatggaattatgttacattggatgcactggaawtatatatatatatagctttatatgatgctttagtaagtgaaaaaaatgacttttgccacagttagggaatatcarggttttataacttaggacttaaaagtttggagttttctcctcccaacttaaaaggtaatcaatttggagaaaaggtaattcagaggcagaaaaagatgaactctaaatgttgttaaatgacttcatttatttcttcattcattgggtattttgagcattttataccaaatgctttaaactgtttgtcrgatagttccaacatctctgtcatgtcctccttggcttstgttttctttccccatggaagttgacattttcgtggttcttcatatactgtgtaattttggattgtaatttgaacattttgaacaaatatttagttagactggatcttatttaaattttggagtatattgatactattgttttagcaagcaatcaccctggtgagatgaagacaatctgtgggatctggttccaatgtcagttccattctgaaagcctttgtagtgctattcagacatgtgcatcaaccaggggtgaaattgggaactgtgcaatgctctactcattagttcaggtcttagcatcttyagtgtgccaattaraaccatatctaggcatgcataagttgaggggcaggtgaatccaggagtttatraataatgttcatgggtctctttctaaagtttcttcctcttcaccatctgacccgtactttcaggttcccaggggcttctcctttccatcctccagctagaaatgcgggcctccttttattctgatgaaccatatacttctgcaattatagctgcatctttaagctcatgtggcagacggacagtgagaaagaagaaaaaaaaagcaagaggtttggccccactctcatggagctacagctcaactgaatggaaaggattgactttagatttcttttctttttttgaggtggagtctcactctgtcscccaggctagagtgcagtggcgcgatctcggctcactgcaagccccgcctcctgggttcacgccattctgcctcagcctcctgagtagctgggactacaggcgcccgccaccasgcccggctacttttttgtatttttagtagagacggggtttcaccgtgttagccaggatagtctcgatctcctgactttgtgatccgcccgcctcsgcctcccaaagtgctgggattacaggcgtgagccaccgcgcccggccgaggattaacctttctcaaggtkttggctattgcatgttgctgtagtttcccctaccatcatcagattgcctgaggtttgaggcacatgagaatgtagacaagagggggagaaaaaataaacgtggtattttcacactctatttgagataggagtttgcttttctgttcctcagaccatacctctagtgcttctcctggagccctctctttatgctgacagaggctcaattccatgtttctggctgtattaagttcggggcagtgatactagaggagggaaatttaaattcaccactggtttgatggctctttaaatttggatattcttgtaagatctgctgctagtatatcctttttccttttgctcttttttgttttgtttaaagaccatatttttagagccattttgggatcacagcaaaattgtgagaaaggtagttttttttttcattttctccttgttgccacacatatatagactctgtcttagtctgttttgtgctgctattacagaatacccaagactgggtaatttataatgaacaaaatctattggctcatagttctggaggctggaaagttcaagactgagaaacacatcttgctccatcatcccatggcaaaatttggaagggcaagagagcacatgcataagaaagagagcaagaggcaccaaacttgcttttataacaaatccactttcgtgatagtaaacccactcccattataaggacattatgacctgattacctcttaaaggacctgcctctcaacactattgcattggggattaagtatctaacacatgaactttggagacacattcaaaccatagcagtctctaacatcaacattcttcaccagcagyacatttattacaattaataacctacattggcatattgtagcactcaaaattcataatctgatggacttccctttgtcagtgacctgacctttctccctggctgcccttaatattttttcttccatttcgaccttggagtatgtgtcttggggttgatctactcatgaagtatcttattggggttctctggatttcctgaatttgaatattggcctgtcttgctaggttggggaagttctcctggattatatcctgaagtgtgttttccaacttggttccatcctccctgtctctttcaggtactccagtcagtggtaggttcggtctttttacatagtcccatagttcttggaagttttgttcatttcttttcattcttttttctctaatcttgtctgtctgccttatttcagcaagagagtcttcaagctctgatattttctcttctgcttggtcaattcagctattgatacttgtgtttgcaacatgatgttctcgtgctgtgtttttcagctccatcaggtcatttatgttcctctctgaactggttattctggttaacagctcctgtaatcttttatcatgcttcttagcttctttgcattgggttagaacataatgctttagctcagcgaaattcgttattaccaactttctgaagcctacttctgtcagtttatccatctcagcttcagccttgttctgtgccctcacaggagaactgttgcgatcatttggaggagaagaggcactctggcttttggaattttcaccgttttttcattgttttttcctcatcttcgtggatttatccacctttgatctttgagactgatgacctttgaatggggtttttgtggagtcttttttgtagatgttgttgttgttactttctgtttgtttgtttatcttctaacagtcagcctttctgaggcaagtctgctgcagtttgctggggatccactccagaccctgttcacatgggtatcaccagtggaggctgcagaacagcagattgctgcctgcttcttccttcagaagttttgccccagaggggcactggcctgatgccagccggaactcttctgtatgaggtgtctggtgacccttgttgggaagtctcacccagtcaggaggcatgggatcaaggacccgcttatgtagagaatctgacattcccttagcagagctggtgtgctgtgctgggggaatcccactcatcgggttcatctggtctcttcagagccagcaggcagaaaagataagtctgctgaacctgaaactgcctctcccctcaggttctctgactcagcgagatgagagttctgtctgtaagcccctgaccagagctgctggaattcttgcagggatgacctgcctggtgaggagggatggctcagggtcccacctaaagaggcastctggccacaacctgccacagccagtttgctgcactgtgggaaatctggcccagtccaaacctctcaggctcctttgcactgtcaggggcaaaccgccaactaatggtggtcacccctccccccaggaacttagtcattccaggcacactccagactactctgctggcagcagggatctcaagccagtgggtcttagcttgcagggatccatgggagtagaacctactgattgagactgctgggctctcctccttggcttcagccccctttccatgggactggatggttctcrtgcctcactggagttccaggcaccactggagtatgtaaaaactcytgcagctcagtgcctgcctaaacagccaccaatggsagtggctgtcattggtttgcccaggtttgtgcttgagacccagggccctggtggtgtaggctcatgagggaatcttctgatctgcagattgcaaaaatctgtgggagaagcatagtacacctggtgggtaggacagaccctcgccacttcccttacctcagggaggcaagtctccccaccctgtgcagctcctgggtgaaatgacaccccacctgctttcttcctgcttcctgtgggttgcaccagctgcccaatgagatgaacttggtacctcagatggagatgcagaattcacctgccttccgcattcatctcactgggagcttcagaccagagctgtttctgtttggccatttgggcccctcccttcaagtatgttttcttttgtaagaaactgccaaagtggctgtagcatttcgctttcttaccagtaatgcatgagacttctggttgctccacatccttgctagtatttgatattgttaatgttttaatgtaacacttaagtaatatgtaatgatatctcattattttaacttgcaattctcaaaagacatatgatattaataatttgtcwtttcattattttgattatgtcttttgcaggttgaaagtttttagttttaatgaagtccagtttatcagttctttctttcatggattgtgcctttggtattatatttaaaaagtcatcaccatacccaaagttatctaggctttctcttatattatcttctacgagttttacagttttgtgttttacctttaggactatgatacattttgagtcattttggggaaaaatgtaaaatctgggcctagattcatttatttgtatgtgggtgtctagttattcagcatcgttagttgaaaagactgtcttttcttaattgtattgctttgcttgtttatgaaagatcagttgactatatttatctgggtctatttctttttagtctgctactctgctttctatcctttttcattaatttatttgtctattccttttttttttttttttttaagagacggagtctcactctcttgcccaggccggagtgcagtggcgcaatctcggctcactgcaagctccgcctcctgggttcacccaccattctcctgcctcagcctcctgagtagctgggactacagacacctgccaccacgcccrgctaatttttgtatttttagtagagacggggtttcaccgtgttagccaggatggtatagatctcctgacctcatgatccacctgccttggcctcccaaagtgctaggattacaggcgtgagccaccgcgcccagccttatttgtctgttctttaacaaataccacactgtcttgattactgtagttttagagtaaatcatgaagtcaggtagtatcagttgtttaactttgctcatctccttcaataatgtgtttgcttttctgggtcttttgcctatctatataaactttagaatcagtttgttgatatttatacaataacttgctgagattattattatcattgcatttaatctgtagattaagctgggaagaattgatatcttggcaatgttgagtctttctctccatgaacataaaatacttctccatttatttagttcttcattgatttcmttcatcagtttgtagttktccacatatagattttgtatatattttgttagatttatacctaagtattttattttttgaatgataatgtatatggcactgtgttctcaattaaaagtccatttgtttatttctggcatataraaaagtgattgacttttgtgtattagccatgcattctgcaaccttacatatcagtaaccttgcatgtcagttcmcaaaattgtcaattattttggattttctacatagatgattatgtcatctgcagagaaatacagttttatttcttactttctcatctgtataccttttatttcctttatttccttttcttgtcttactgcattatctggtacttccagaacaatgttgtaaagtattggcgagagggacatctttgccttgtccttgatcttagtgggaaaacttcaagtttctcaccatacttgaggatgttagctgtaggttattgtagatattctttattaaggtgaagaagttcttccctatttctagtttactgggagtttttgtcacaaatctgtgttgaattttgtttactgaaagttatcacaaatgggcgttgaattttgttaatttttttgtatatattgatataatcaagtgattttttttagcttgttaatgttatggataacattaattgatttttgaatgttgaacctgccttaaatagctgaaataaatttaacttcatcacagtatataattctttttatacatcattggattggatttgctgatgttttgttaaggttttgcatctatgttcatgaggtatattggtccatagttttcttttcttgtgatgtcttaatctgattttcctattaggataaagctggcctcatagaatgagttaagaagtattctctcggctctaacttctaaaacaaattatagacaattggtataattttttccttaaatatttggttgaattcaccagtgagtccatcttgacatggtgctttctgttttggaaggtcaacttctgtaataaatgtwaacatatttaggtcatctatttctccatgtatgagtttagacaaattatgtctctcaagtgattgatcctctgtgtggacatagaactgtccattttagcatccatgggatctgtagtaacaactccttatttatttctgatatagataatttgtgtccttcctcttttcttcttaattagcctggctagagccttatccatttttttttttttaatctttcaaacctagtttttggttttgataacttttttctatcagtgtcccattttttatttctgctctaattatttcttttcttctgtttaatttgtacctgatttgctcttctatttctagtttcctaaggtgtaaacttagatcattaattttagatctttatttttttctaatagatgcattcaatactatcaatttctctttaaacaatgcttttactgcatcccacaaattttgttaagctgtattttcattttcatttagttgaagtattttaaaacttctattgtgatttcttccttgacccatatgttgtttagaaacgtattgtttaatctccacatgtttgtggagattagtgggattttaaaattttctttctgttattgactctagtttatttacattgtggtctgagagcagacgctgtatgatttctattttgttaaatttgttaggatatgttttggcccagaaggtggtctattatggtgattattccatgtaatcttgagagtgtgtattctgctgttgtttgacaaagtagtctatagatgtcaattatattcggttaattgatgatgttgctgagttcacctaagttctactgattttctgcctgctggatctgggcatttctttctttcttttttttttttttttttttattttgttgtttttgagacagagtctcgctctgtcacccagactggagtgcagtaatgcaatctcatctcatttcaaccactgcttcccgagttcaagcaatcctcccacctcagtctcctgagtagctgggaataccggcaaataccaccacacttggctcatttttgtctttttgtagagacagattttaccacattgctcaggttggtcttgaactcctgagatcaaataatccagccttttgggcctcccaaagtgctgagattacagtcatgagccamtrtaccctgctggatctgtgcatttccaatagagtgttgttgaaatctccaactatgataatgaattcatcgatttctccttgcagttctgttaatttttgcctcacgtagttaaatactctcttgttaggtgcgtgcacatttaggtttgttatgcggaaacataacatagtttcttggaaagctaattcttataccattatgcaatgcttttcttcattcctgataaatttccttgctttgaggtttgttctgtttgaaatttgtatagcttctcctgctttcttttgtttgtgccagtatgatataatacatatatatattcatgatccatttacttttaatttgtgtgtctttatatttaaagtgcatttcctgcagacatcatatagtttaatctctgatttttaattggtgcatttagatcattgatattaatgattattaatataggtggattaaatatctaccatatttctttctgttttctatttgttgcctttgttctttgtttctatttttgtttttcattctcttcttttcagagactgagtctcattctgttcattaggctagagtgtggtggtataatcatagctccctgtacccttgaaatcctaggctcaagtgattctcctacctgagccctgagtacctggtattacgggcatgtgccacaaagcctggctaatttttatttaatttttgtagcgacagagtctttgctacgttgcccaggctggtcttgaacttctggcctcaaatgatcctcctgcctcagtgtctcaaagggttgggattataagtgtaagctacaacacccagccatgtcttccatttttttcctgcatttttagtttttaacttagcatttataaagttccatattttctcattcttagtatatcaattatactttaaaaatgtgattttagtggttaccctagtgtttgcaatatacactcacaactaacataagtttgctttcaaataatactataccatttcacaggtactgtgagtaccttataataaaaaaatctaattctctgcttttatcccatgtgtcatttctgttatttattttatttacatgtaagaatacataagcatataaatatatataaaagatgtatacataagcacacataattaaatatattgctactattgktattttgaacaaactgccatttgttagatcaattaagaataagaaaaatagttttattttaccttcacttattttttatattgttcctttttcatataatttaggtttctaacctgtataattctctttccttttaaaataattgcatttaacttttttgttttttgatataagacaagtctactggcaacaagttatctcaatgtttctccaaaatagtggttgtttctcattcactttgaagaattttttyggctaaagaattctaagttgataaggttttttctcttaatactttaaatatttgtttccactgtcttcttgcttgcatggtttttgagaagaatgtaaatgtcatttttatctttgtttctctacatgtagaatttattttcctctggattctcttatgatttcttaaatctttgataaagggggtacaggggcatatgtgaactctatatttttaattcagtatttctgtcaacttaaactgataaaaactaaaatctattgattaagacaaatatcttgggaaacatcaatgtaaagcttgctgatctctctagtgttggggggaatgttggagaaaaatatgcctatttagctaaggacaaacctagataaattaactagargtgtgaattgtatgcaagagattgtgtcagaacagggttccaataatgaacttcataagaggttttagataacctaagacattttgaaatataacacaactacaggaaattatacaatacaaatatgtagcttgattaattattataagataaacacctttgttgactcctgatatggcctagctgtgtctttacccaaatctcatcttgaattgtagttctcataatccccacttgtcatgggagggacccagtgggagataactgaatcatggagttggttaccctcgtgctgttcttgtgatagcgagtgagttttcatgatatctgatggttttataaggggcttttacccctttgttaggcacttctgtctcctgctgccatgtgaagaagaacaygtttgcttcctcttccaccattattgtaagtttcctgaggcctccccagccatgtagaaytgtgagtcagttaaacttctttcctttttaaattatccagtcttgggcagttcttcatagcagtgaggatggactaatacaactgctaacattgtctragaaagatccttgttatgtggctcagaggccctccatgtattcttaactattcactctcctatccttccaagaataacactaatttgacctctacaataatcactttatcactccagttttgccttttttcctccaaaacaatgccttttaagtctattttaatcgatagatttcctcttaatatcatttaaaaatatttctttacatttttagacaggaatcagaataatttgctatgttgaatttccagttacttggattttgttgatttcattcctgtggtttagttgacatgaatctctccaattgaaagggtaacttgaatatggtagctggaaagttaaaatcaattcttttaactttggaaaatgattaaattctggagatagaatagtaagttcataagatgacaggtcatttgcatcctctagtgaaaagcgaaggrattaaataaaaataacattttgatgcttaatgtttctggcagtattatgtctgtatttaattgttaaaatgtttttcaataattttttccaggttgtstgcattcaaaagagcattctattaaagctaccttaatttggcgcttatttttcttaatcatgtttctgacaatcatagtgtgtggaatggttgctgctttaagyggtaagtgaactgtaatctttattcatctagagagaattatacttgtaaaaagaagaggaagaatctgaataattttgttattctttacagcttttaatatattgtctcactaactgagttacactccaataactttttaagtggcaccaaaaattttaattatgtaaatagggttcacattattccaagtttagtgagatgatcagagtcttcagaaggtagaagacagaccactattccttaagaatattgatgcaaaaattaaaaaaaatagtaaactgaaaaatagtctcttgtccgatctaggaacatggttaattttacctccacaacaaccttgtttcatgaaaaatagcaaaacagatggtttaaagtacacaaaactactaagtggctgtataacatcacaggcagcctgttctttcttcctagctatttgagcatgttctggcccttgttttttttagcatatgtagcccatcttcctagaaaacaaactccgtttagtgattgtaccctaaaagcaattagctataaaaattatcttgtacttcaaaacatgcttgcagtgcatctaatatagaccaagcgaagacatagaaaactacaaaagcacttcccccaaacctcatgccaatctggatatcaacctaaaatctaccccctgttactacattctgaagtaatttcagagagacccttcaaatactgcttacgtaacttaagagtcagcaatacttggagcactccatataacactctaaataatttctattcatttgcaaatcttttgcttattatcttttggcattttgaaaccacagataatatactttatacatttatgaagcaaaaataatttttttatttcagagatttaagtcaactaattgtaactatttaagaaagaaaaaattggaaagagacaatttctgtactctgtaagtacctcagtattaatcaagggaatgtattctgaaatataatttaaatttatagctcttttttttacagtaagcatatgaaattgacacttatgactgttttcctttattatccattatgtgtttctcttcctttcagctagcactttggaaatgatttcttgtgtggagccaatagctggagccatcttctaatctggtcattttctttctttctttttttaaatgtgttattatgtattactttatatcatttttatgttttatttaacatttagattgttagttaactattcaagtgtggtatttccccatttaaatcgagttatttagattggctttagttataaaaattcctaatagagctttgtagttatagctctggtccctaactttttttttaaattatactttaagttctgggataaatgtgcagaaccygcaggttcgttacataggtatacacgtgccatggtggtttgatgcacctatcaacccatcatctatattaggtatttctcctaatgctatccctcccgttgccccccaaccctcaacacgcctcagtgtgtgatgttccgctccctgcatccatgtgttctcattgttcagctcccacatatgagtgagaacctgcagtatttggttttctgttcctgtgttagtttgatgagaatgatggtttccagtttcatttgtctccctgcaaagaatatgaactcattcttctttatggctgtatagtattccatggtgtatatgtgccacattttctttatccagtctatcattgatgagcatttgggttggttccaagtctttgctattgtgaatagtgccacaataaacatacgagtgcatgtgtctttatagtagaatgatttataatcctttgggtatagacccagtatttctggttatagatccttgaggaattgccacactgtattttccaaaatggttgaactaatttacactcccaccaacagtgtaaaagtgttcctatttctctacatcctcttcagcgtctgttgtttcctgactttttaatgattgtcattgtaactggcatgagatggtatctcattgttgttttgatttgaatttctctaatgatcagttatgatgagctttttatcatatatttgttggccacataaatgtcttcttttgtgaagtgtctgttcatatcttttgcccattttttgatagggttttttgttttattcttgtaaatttttttaagttccttgtagattctagatattagctgtttgtcaaacggatagattgcaaaatttgtctcccattctgtaggttgcctgttcactctgatgatagtttgttttttttgtttgtttgtttttttttttttttgtgcagaagctctttagttaaattagatcccgcttgtcaatttttgcttttgttgcaattgcttttggtgttttaatcataaaacctttgcccatgcctgtgtcctgaatggtattgcctaggttttgttctcaggtttttatggttttaggtcttatgtttaagtctttaatccatcttgagctaatttttgtgtaaggtgtaaggaaggggtccagcttcagttttctgcatatggctagccagttttctcaacaccatttattaaatagggaatcctttcccccattgcttgtttttgtcaggtttgtcaaagatcagatggttgtagatgttgggtgttatttctgaggcctctgttctgtccattggtcaatatatctgttttggtaccaacaccatgctgttttggttactgtagccttatagtttaatttgaagtcaggtagcatgatgcctccagcttagttctttttgcttaggattgtcttggctatacaggctcttttttggttccatatgaaatttaaagttttttttttttttaattctgtgaagaaagtcaatggtagcttgatgggaatagcattcaatctataaattactttgagctatatgactattttcataatattgattcttcctatctatgagcatggaatgattttccatttgtttgtgtcatctcttatttccttgagcagtgatttgtagttctccttgaagaggtccttcacatctcttgtaagttgtattcttaggtattttattctcttagtagcaattgtgaatgggagttcactcatgatttggctctctgtttgtctgttattggtgtataggaatgcttgtgatttttgcacattgatttcgtatcctgagaatttgctgaagttgcttatcagcttaataagttttaaggggatgagacaatggggttttctaaatatacaattctgtcatctgcaaacagagataatttgacttcctctcttcctgttgaatacactttctttctttctttcttttacctgattgccctgactagaacttccaatactatattgaataggagtggtgagagagggcatccttgccttgtgccagtttacaaagggaatgcttccagcttttggccactcagtatgatattcgctatgagtttgtcataaatagcttttattattttaatgtatgttccatcaatacctagtctattgtgtgtttttatcatgaaggggtgttcaattttatcaaaggccttttctgcatctattgagatcatcatgtggtttttgtcattggttctgcttatgtaatggattacatttattaatttacatatattgaaccagactttcatcccagggatgaaactgacttgatcgtggtggataagcttttgatgtgctgctggattcggctggccagtattttattgaggatttttgcattgatgttcatcaggaatattggcctgaaattttcttttttgttgtatctctgctaggttttggtatcaggatgatgctggtctcatataatgagttagggagaattccttctttttctrttgtttggaataatttcagaaggaatggtaccagctcctcttcgtacctctggtagaattcggcagtgcatttgtctggacatgggcttgttttggttgggtaggctattaattactgcctcagtttcagaacctgttattggtctattcaggaatctgatttcttcctggtttagtcttgggagggtgtatgtgtccaggaatttatccatttcttccttgcctgggtatcaccagcaaaggctgaagaaaagcaaagattgctgcctgctccttcctctggaagcttcatcccagaggggcacgcaccagatgccagctgagctgtcctgtatgaggtgcctatcaacccctgctaggagttgtctcccagtcaggaggcatgggggtcagggacccacttgaaaaggcagtctttccctcagaagagctcgagcactgtgctgggagatccactgctcttttcagagctggcyggcaggaatgtttaagtctcctgaagccgtgaccacagccaccctttcccccasgtgctctgtcccagggagataagagttttatctataagcccctgactggggctgctgcctttctttcagagatgccctgcccagagaggaggaatctagagaggcagtccggctgcagtggctttgctgcactggctttgctgcactgtggtgggctccgcccagtccgaacttcccccagggctttgtttacactgtgaggggaaaatcacctactcaagcctcagtaatggcggatgcacctcccctcaccaagcttgagcatctggggtccacttcagactgctgtgctggcagcaagaatttccagccagtgggtcttagcttgctgggctctgtggggattggacccactgagcaagaccacttggctccctggcttcagccccctttccagcagagtgaatgattctgtctcagtgggttccaggctccactggggtatgaaaaaaactcctgcagttatcttggtgactgcccaaatcgccacccagttttgtgcttgaaacccagggttctggtagtgttggcactccagagaatctcctggtctgtgggttgcaaaaaccgtgggaaaagcgtagtatctgggccagatagcacctcacagcacagtccctcacaacttcccttggctaggggagggagttctcccaccccttgtgcttcctgggtgaagcagcgccccaccctgcttctgcttgccctctgtgggctgcacccacttgtgtaaccagtcccagtgagatgatcctggtacctcagttggaaatgcagaaatcacctgccttctgcattggtctcactgggaactgcagaccagagctgtttctaatcagccatcttgccctctctggtctggtcgttttctttaaattggttgatacaggagcagtgatagcacaacaaatatgcacagatttggggaaagtcatcctgccttatggtctggttcaagaaattacattttaatagttataatttggtatcaccttgtttgtgataccaaaccagatacaatacacgtttgcctcatgttatgatttgttattcagattacaccagttattattcataactaagagtgatttctcatctcacaagagccaaatccaaggataatggtgccaattgatagtaatgattctatgaatacccagcattctggtctatcatagacactttcagaaccattgagttgaaggtagaaggtggttatataatagaagatgaactggtagctactaggggctcagtgacaactatctggagagacattcattcatctcgatcccacatgaagagagcatttctcctgattatataagaagtgggtcagaaaagcctgtccagtgaagtattgctgccttcaaagtgtagaaaacctcactacatctccttagtggaaggaagttcactgtacaacaacttatttcatatttatgatagtatttagacatatacaaggctttttcacatcaagaaaccttattcacataaggcatctctatcctgcccttcattttaccaagtcatctggagcagcaatcgccaaccttgttggcatgagggaccagttttgtgaaagacaacgttttcatggactggggtcaaggaatggtttggggataatttaagtgcattacttttattgtgccctttatttccattattattacattgtgtaataatatataataaaataattatacaactcaccataatgtagaatcagtgggaaccctgagctagtttttctgaaagtagatggtaccatctgtgagtgatgggagacagtgacagttcatcaggtattagattctcacaaggagcccacaacctagattcctcacatgagaagttcccaatagggtttgccctcctatgagaatctaatgccactgctgatctgacaggaggtggagctcatgaggtaatgtgagtgatggggagtggctgtaaatacagatgaagcttcacttactcattcgctgcttacctcctgctgtgcagcctgcttcctgactcatccatggaccagtactgatccatggcctaggggttggggacccctaatctagagcacttggagaactatctgttctccaaagctgatcaaatgctatcattaatgtatctaatattttaagaaagggtaacactgttgagagccaaatagatacatggcccagagcaagcttaagttactaataactcctttttcagctcaccccctgctgaaggcatgagtttgaatctcagttttgccatttgctgtgtaatgtatgcaattatatttagcatcatatttctcacttgaaaaatgaaaataatacatttaatacttamcaggagtgtcagaaagtatattagcacttggtaatttatacaatacaatataaaagtaagaaatttttattttatttatttttattttattttcagcaataagagctaactgccatcaagagccatcagtatgtcttcaagctgcatgcccagaaagctggattggttttcaaagaaagtgtttctatttttctgatgacaccaagaactggacatcaagtcagaggttttgtgactcacaagatgctgatcttgctcaggttgaaagcttccaggaactggtaagaaaatagttctggccagaatcaaagattcagccctacaaggatatgttttcctgtgaaattatctaagaggtaggtttagacatcwgcttttacattgattttttttttttttttttttgcataacgaaagagtaacctagcatgtattatattttacagtgaaccatctaaaattaccttaatattcgtggcaggaacaggcccagagggcaagcaagccagagccttctttgacttgtgagccagaattgtgcaaataaggattagaaaagtattggtagaaacccagttttaagtttgtatgaagttagcaacattgtttcaaaataaatcaaacaaggccaagagcagtggcacatgcctgtaatcccagcactttgggaggccaaggcgggtgtatcacttgaggtcaggagtttgagatcagcytggccaacatggtgaaaccccatctcaactaaaaaatacaaaaattagctgggcatggtggcatacgcctgtagttccagctactcaggaggctgaggcagcagaattgcttgaacctgggaggtggaggcctacagttagctgaaatcatgctactgtactccagcctaacagagtgagactctatctcaaaaaaataataaaataaaracaataagtcaagcaagaatgatgtcatagagrttggtagactaaaaagctacagaaatctgttcctccactgagaaaactattgaactgtcaaaaactgtctgaagtaactattttggaattctcgagtctagttaaacactggaagcatcaagggaagagtttgataaagaggatgataaattttggttaatgttggtgaatttcagcctttccactcaataataactattttccataccccattattgcagggatccatgggaactgctgcccatgttcttgtaatgaattcctgcagccagggtgaacaataagcacctttttgtccaaatrtcagggttattgctgatttctgcctttgaatgctgaggggcagacacagaagtgggctatcattacatcagtcctcatcagctgaagtggcttcccaaggatttaaataaatagtatgtgtttttcctccctttaggaagcagtcatttaagacaatttttattagataactggctgacagcagagataacagaacagagatttcaatgaccatgcacaacagagaataaaaatagttgggaaaaaatcatgaccaaatgactctgagccacaacaaccaagatttgacaatccctgaagagcaaaataattaagttaccagagttaccacaacatrgtaytcataatgtccagttctcaaaaaaaaattacaaaacatgcaaagaaaagtatggttcattcacaggaagaaaaagtaatctgacagaaactatccctgaagaggctcagatattaaaaatatgagtcaaaaatgttaaatcagctgtcttaagtataaccaatgagttaaaggaaactagacaaaaagctaaaggaaaccgaaaacataataaatgaacaaaattagaatatcaatataaaggtagaaattgtaaaaaagaaccaagcaaaaattccagagctgaaaagtacaatgactgaaatttaaaaataattttaaaaactcaatgaagaagttcaacagcagatttgagaagtaagagatcagaaaacttgaaaataagataattgaaacaatccagactaagaaaaacaaagaaaaagaatgaagataaataaattctaaggaacctgtaggacatcagcaaacatactaacatatgtactgtagaaatccaggaaagagaagagaaagagaagcagagaaatacacttaaagaaataatgaacaaaactttccaaaatctgaggaaatacataaatatatacatccaagaggctcaatgaactccaaaagggtaaacttaaagagatctacattgagacaaaatatagtcaagttgacaaaatccacagagagaattttgaaagcagccagaatgaagcaactcatcatttacataagaccctgaataaaattaatagctgattttctctgagaaaccatggagatcagaaggtagtggaatggcatatttaaatgtctgaaagaaaaaataaaactgccaaccatgaattctatgtatagcaaagttgtccttcaagaatgaaggaaaaagtaacacattttcagataaccaataattaagggattttattaccagtagacatgtgctacagaaaatgctaaaggaaaccttttaggctgaactgaaagtacactagacagcaattcagagcctccaaaataaasaatattcataaaagtaacaatagaggtaaatataaaacccagaattactacatgtgtcatatagtttataacttctcctatttatagctttctatatttatatttatctataacttcataggcaaatgaataaaaattataaatatgatagtggtcatataatgtataaagatgcaatctgtgacagtcttatgaagcagggatgaagacatataggatcaaaatgtttgcatagttattgaagctatgttgatattatgaaattatattgttacaagtttaagatgctaattataattctcaaggtaaccactaataaaattaccaaaattatgcagaaaaggaaaaaagaaaaacaatacactataaaaaaccaattaaatacaaaaaatgtcagtaacagacaacttgagaaacaaagacatataagatatagagaaaacaaatgattaaatggcaaaagtaaatcttgttttagtaatcacattaaatagaaaaggatgaagccatcctattaaagggctgagactgacaagttggctaaaaactaaaataaattaaaaagaaaaacaagactcatctacatgctgtctataagagacttgccttagatataaggacacaaagaagttgaaagtaaaaggactgaaaaagatattccatacaaacagtagtaaccaagatagtgccgagtggctatatttttgtcaarcaaaataaactaaagtaaaatttacaagagaaaaagaagggcattatgcattgacaaaaattttgacatagccaaataattatctgttataaaatatatgtacttaataatacagcctcaaaatatatgaagcaataattgctataatttaagggagaaaagaacagttctatgaaaagttagagaatgaaatattccactttcaacatgagattaaacaactagacataagatcaataaggaaatagaaaatttgaacaacactataaaccaattatccctaacaggcatatacagaagaatctacccaacaagagcagaatattaattcttctcaaatgcacatggaacattcttaaaaataaaccatatgttaggccacaaaacaagtgttagtaagtgtgaaaatttgaagtcataaaaagtatcttttgcaattacaatggaatgaagctagaaatcaataactagaaaaaccagaaaagtcacgcatatgtagaaatttaaaaacctgctcttcaacagccattggtcaaagaagaaatcacaagggacattagaaaataccttgagacaaatgaagtaaaaatacaaatagcacgtttatggtatacactgaacatagttctaagagggaaatttatagctgtgagcagttaacwaaaaaagaagaaagatctcaaatccatagcctaactgtacactgtaaggaactaaaaaaagtaaaacaaaaatagaagtcatctttatgatttgaaagagtaaaagatttacctaataagtccctaaatttactaataataaagaaaattgtttatatatttaattgcgttaaaattcagaacttgtaatcatraaaaggacagtacacattgacaaggaaacacagcaaaggaaaccagcctatgctgctgctgttgtgaggataatttggtacacttacattagtttggtgtcttttctttctctctctttctttctttctttctctttctttcgttcgttcgttcattcgtttctttttgagacagaatctcactctattgcccaggctggagtgcagtggcgtgatcttggctcactacaacttttgtctcccaggttcaaatgattctcatgcctcagcctcccaaatagctgggattataggtgcatgccatcacgcccagctaatttttgtattttttttaatagagagggggcttcatcatgttggccaagcctagtctcaaactcttggcctcaggtgatccgcctgcctcggcctcccaaagtactgggattacaggtgcctggcctggtggtgtcatttcttaaagttgacaaaaagcatatcctggggcctaaaaattctattctaggacaggtgccaagaatgtcatagtagcatacattccaaacttgataaaaccctggtgtcaaccgatagtataatagataaattggagaagagtcatacaaaggagtacaatacagaaacaaaagtaaccaaattatcaacaatttctctcagttttaaattatcttcttttgatatgtatgataatatagcacacctattctgtatgtattactaaacaatacaaaatcaaaaggaagaaaattatgastagttaagaatatagcatagcagcaacatttctgggagaggatgggttatgttagattaatgaatatcatctctgtgttttctgaaagaatttcctgttgagatataaaggcccatctgatcactggattgggctgagcagagaacaaggccaaccatggaaatggataaatggtactgaatggacaagacagtaagttctaaaaatctggcagtaatatttgtatttgaatttactttgcattaaatctgaagtgttctctagttacatgctttaaaaaattctcattttaaggttagtcatgaaagaagatggtgccaacttgtatgttgcaaaggtttcacaagttcctcgaatgaatccaagacctgtcatggtgaggtagactgactgtgaacttggctccaggcttatctatgtcattttcaaacactttcattttaagcaaaccatacaatatctttaagtctgttccttacctccacaacaaaattaaattgcacttgtcctcctgatttcacagggttgatgtgaggaacagaggttttgatgtatcagggaaagattatgagtgacagcaattatacctattatttaaaataagacaatagttttaaaattttaaaatgggtaaagtttggcactagaaaatttaatctcaattgtatatttataggatcttcagattactaaaaagatttgagataatgctggaaaaattggattcacacaatttcactcaatgtttgtctgagagatgagacagttttgaaaagctactttattgtaatacattcatcaatattggaaatataactttatttaataaaaagagccccagactggacattggcaggtttgaaatgagttttttctcattagcttttgaccttggatgggatggtaagttttagaaatcagagaacatgtacatttatacattgttgtatctacactgccttgcacattgtgactgcttcataaatatctagaattaacttttatttcttattttacaatacggaagtagtaaattttctctacctaattcttaaaatggttttttgtttgtttgtatttttgagagacagggtcttactctgttacccaggctggagtgcagtagtaccatcgtggctcactgcagccttgacttccctggctcaagtgagcctcccatctcagcctcctgagtagctgggactacaggtgtgtgccaccttgcttggctttttttttttttttttttttttcagcgatggggtctcactatgttgcctgggctgatcttgaactcctgagctcaagcaatcctcccacctcggcctcccaaaatgttggaattacaggtgtgagccaccatgcctggcctctcaaaatattttaaggatcaaatatattattaactaaccagtttttggaaactgctcatcacttaaagaaatgtaaaatattatatgattaaggtctaacaagtttcaacaattagcaaattatatcatagatgatagtgattccaatgagcaaagaggaaaaatttataatccaaatgctgacctaaaatatctgtgccaagccatctaaactcagctaaatagcactgcagtttcagtactaaaaccaccagggaagtaggaggaataaaatcaagcatggtttttagaaatagctgctgagtcttcagttatttaaggaagcaaaatattgggaaactgtgtaaagaaaacgtgtcagacttctcccatcagccagctaaggctttggatgtacttgaaagaatattatgcttacagacatgaaataggtttgattcaggactttgcagtattcctatagttgatttataacatctcctgctaagcaaagcccactgactaattagtcaccactacacaaggaaaaacagcattatttttagaggstgaattaatgttagttttctcattttctcatcttcattctctctgctgttgaagaaatgttcagtggccaactgattctgcttcttctcttgcaggtttcctatcctgggagcaggagagtgtgcctatttgaatgacaaaggtgccagtagtgccaggcactacacagagaggaagtggatttgttccaaatcagatatacatgtctagatgttacagcaaagccccaactaatctttagaagcatattggaactgataactccattttaaaatgagcaaagaatttatttcttataccaacaggtatatgaaaatrtgctcaatatcactaataactgggaaaatacaaatcaaaatcatagtaaaatattacctgttttcatggtgctaatattacctgttctcccactgctaatgacatacccgagactgagtaatttataaataaaagagatttaattgactcatagttccacatggctggggaggtcttgcaatcatgacagaaggcaaatgggaagcaaagtcatgtcttatgtggtggcrggcagggggacttgtgcacaggaactcctatttatacaaccatcagatatcttgagacaagaacagtatggggctccctggtgtgattccgtcctgcgcggctgttctctggagcagcattcatttatcttcgtctgccttgtctcctacctaagtgtgtgtcgccacccgatggaagattygatggacatggacatgagccccctgaggccccagaactatcttttcagttgtgaactaaaggccgacaaagatgatcactttaaggtggataatgatgaaaatgagaccagttatctttaagaacggtcagctcaggggctggtgcaaaggatgaactgcrcattgttgaagcagaggccatgaatgaygaaggcagtccaattaaagtaacactggcaactttgaaaatgtctgtacagccaacggtttytcttgggggctttgaaataacaccaccagtggacttaaggttgaagtgtggttcagggccagtgcatattagtggacagcacttagtagctgtgaaggaaggtgcagagtcagaagatgaagaagaggaggatgtgaaactcttaagtatatctggaaagcagtctgcccctggaggtgggcagaaaaaagtaaaacttbctgctgctgctgmtgmtgatgatgawgawgatgatgatgatgatgatgacgaggaagctgaagaaaaagcgccagtgaagaaatctatacgagatactccagccaaaaatgcacaaaagtcaaatcagaatggaaaagactcaaaaccatcatcaacaccaagatcaaaaggacaagaatccttcaaaaaacaggaaaaatctcctraaacaccaaaaggatctagttctgtagaagacattaaagcaaaaatgcaagcaagtatagaaaaacgtggttctcttcccaaagtggaaaccaagttcatcaattatgtgaagaatttcttctggatgactgaccaagaggctattcaagatctctggcagtggaggaagtctctttaagaaaatagtttaaacaatttgttaaaaattttccatcttatttcatttctgtaacrgttgatatctggctgtcctttttatagtgcagagtgagaactttccctaccatgtttgataaatgttgtccaggttctattgccaagaatgtgttgtccaaaatgcctgtttagtttttaaagatggaactccaccctttgcttggttttaagtatgtatgggatgctatgataggacatagtagtagcagtggtcagacatggaaatggtggggagacaaaagtatacacgtgaaataaaactcagtattttaataaagtaaaaaaaaaaaaaaggtatggggaaaactgcccccataaagcaattgtctccacctggccctgccctttgcatgtggagattattacaattcaaggtgaaatttgggtggagacacaaccaaaccatatyagatggctatatcaaaaagacaagaaataacaagcattggtgagagtgtggagaagacggaacccttgtacacagttggtgggaacacagtttggtgcagccattatagaaaacgtcatggaggttcctaaagaaattaaaaagagaactaccatatgagccagcaatcccttttccagatatacacccaaaggaaatgaaatcaccacctcataaagatatctgctttcctgtttattataacacatctttattcataatagccaagatacggaactaactgaagtgaccattaacagatgaatggataaagaaattgtcatatatataaaacacacacattatatacatacatacatatatatatataaaaaaatagaatattattcagccttgtaaaaagaaatcctgttatgttgggaacaagccccccaaaatctggccataaactcaccccaaaactggccataaacaaaatctctgcagcactgtgacatgttagtgatggccataacacccacgctggaaggttgtgggtttatgggaatgagggcaaggaacacctggcctgcccagggtggaaaaccacttaaaggcgttcttaagctacaaacaatagcatgagcgatctgtgccttaaggacatgttcctgctgcagttaactagcccaatctattcctttaattcggcccatcccttcatttcccataagggatacttttagttaatttaatatctatagaaacaatgctaatgactggcttgctgttaataaatacatgggtaaatctctgttctgggctctcagctctgaaggctgtgagacccctgatttcccacttcacacctctatatttctgtgtgtgtgtctttagttcctctggcgctgctgggttaggatctacccaactgagctggtctcagcactgttatttgaaacaatgtaaataaacctatagggtttattatatatactaagtgaaataagccagacacagaaaaaaaatgttgcatgatctcacttatagtgaaacttaaaaaaaaacccaaatacatagaaatagagtagaatggtggttaccagagatgaggaaaatacagagacacaggtcaaaagatacagagttgcagttacaaagggtgagtatgtctagatatctaacatacagtatgaggactataatagtattgcactgtgtactgaaaacttgatgacagattttagatattcttaccacacagacaaaaagaaatgtaagtatgtgagatgaagcttatgttaattagattaagtgtatgtacataaaaacatcacattatacacatcaaatatatacaataaaaaagcacattgggagatacatgataaatttctatctgcagttgctatttgcatttttaaaggatatttttattttttaaatttttagctgacaactgtataattatggaatacaatgtgatgttctgatatatgtgtacactatggaatgattaaatcaaactaacatttcatcatctcacatacttatcattttctgtggtgagaacatttgaaatttattctcttgacaattttgaaagatccaatacactattattaactatagtcactatgctgtgcaatagatctcaaaagcttattcctcttaactgaaacctactaccctgtgacatgtggggaacatctctctattccccagccccagtccctaaatgttgaatacacaatggggaaaaaatagtcttcaatgaatggtggtgggaaaattgtatatccacatgcagaagaataaaattggacccttacctcctaccatatataaaaaccaactgaaaatcgattaaagacttaaactgtaaaactactaaaagaaaatatagggagaaagcttcacaacgttggtctgggcaataatttttggatttgacctcaaaagtagatgcaaccacagtgaaaataaacaaatgaaattgcataaaataaaaaatgtttctgcacagcaaaggaaataattaatggagtaaagagacaacttacagattgggagaatatatttccaaactattgttggggctcagaaacggataccctaacatatagtgatttgacaggtggaactaaagaagactcgaggtctctctgacctcctcctcaacctctgtttcttaatcctctgttttcccagagcacaggaggaagttctctgaagttcctttatctgctttaagttcagactcaccaaataagaaaacagttaattctggtgccttccatgggttttcattaactgaagtcatattgtaggaaaaagaatgaagtctcttaacccacctggatagatttttctcacaaaccattgtcttctctgcaagcccagtagactttgtcccaggccatttatgtgatcttcaccccattaagttctccccaaattatttactcttcccccaaaatcacccacacttccccatctccctctcccctaaggacaagggtatatcaccatctataccccattgcttggtggggtgatcactctgatttctctgcatgcatttttatagatttgtttgccatttatcctattaatctgcattctgtcaattgtggcaagttatcagcgtattttttaacttttaattattcttaatggaaagacacttctgtatacactggaaatctcaggaaatttcttttttccttaagcttaattgaaatgtttacttttcagtaaaatttcaagcttgagtaatgttcatgcctgcttttcattgaaatagaatgaaaaggttgcacaatattattttcatgaaattacttctagtataattctgaataaacactttgaaaggcagtgaactgtaaatatattacagctatctcttattcttcagggtgggtctcaattatgtaaaagatgattggctttctgttttaagtaatagtcattttgaaaacactttaaaactgtcaagtgaagtgtgatggctaattttatatgtcaacttgactgagataaggtatactcagcagggaaagcattatctctggatgtgtctatgagggcttttctgaaagagattgatgttggaatcactaagctgtgtaaagatgatctaccttcaccaatgttggcaggcatcatccaatccgtgcaggtcttacccaaacagagcaaaaagtcaggtagggtaaatttattctcttctaaagctagggcatccatttctttctactctcagacattggagttccccagtttcccagacctttggccttacactgagaattatgctttgttttatttaggcatattttaataatacttcatgtattggtcaggaagacatttcctggttctaaggctttcgactcagactagattacaacactggctttcctggttctctagcttgcagaagagaatactaggaagcttgtacttcctacataggtaagaagaggaaactaaatctctggcttataaactatgtaaccaaccacaattcacaaagattccataatttccttggcaggaggctaagatctaaagcccaatatgattgtacttctcttatcagttttctgcaaacaaaagagaatagaactaaaatacagctttgttaaaataatgttgattcatttgcatgaaatatcagatcacagaaacaacatatttttataaaatatgagctctgtcacactggccctcatagacacatccagagataatgctttccctgctgagtataccttatctcaatcaagttgacatataaaattagccatcacacttcacttgacagttttaaaattaggttgttttttccaaatgacaaaaagcaggagcaaactgcaagtgctcctgcaacacatctaacaagaaagccttatctgacttttatgaggttcagtataatgcccaaactgcatatttcaaactcttgccatcagattcacctaagaagacaaaagatctattgcctttgaacctacattcccaaagcgtgcaacatgaacttgcctacatccaaggggtaggaccttcttacgtagtgaattcccaaagtgttgctgaaattatgaacagtgctctgcctcatactgacaagtgaaacctctatctctgattgcccaaaaatgtctaatgaagctatagcatcactacaatttggaatagacacttaatccagaattgaagagatatagataaaaatgaactgagtgcaatgccaagagataggataaatatggccccctccaaaaaaagatcctaagtccatgacaatggtgctagagatttctcacaaaactccaaggagtaaaacaagaaactataaagacagatggagaaccacatgttatggtgcatcatataaacaacgaagagatggtagtcaattgtgtaagaatcttgaagttgttgggttcaaataaagagaattatgaaatgaaataagtatccaattaacacaggaaataatatgaacaatggggttaggagaacagagatcaatgtaagagatgtttccaaaagtaatgatgttgtcatggaagttggcagatgatcaaattatcaggtatgtaaaactgatcatgaaggtgttccaaggaaattactctaattgtttcatcaatattgaacccaaaattaaatcaacacaaacatagaaaaggaaaaaaaaaaaaaggcaaaaggcacagtgtaatgatgctctctttactcctttggaagggattgataaaattgcaactacttcttgtataaagaatcatccattttatagatgactacaaattcaatcctaaaccttcaaatacaatgaaaagaaagtatgtactgagagctggaatgactactcacctaggccaaactctcacctaggaatgaagcatcaggcacacagtgcactgagcatggctgaaggtgcattgactaatcttctaaaacctactccagaatgagagagactggtacaactccatttgtgctaaatttggagatataaacaatattttggagttaaaacctagaagttttcaaatctacataaaaaatcaatttcttttttttcttgcaaaagcagaaaagatgagaggacattggcacctgccaagagtgttgatgaaatggggtacttccctggcctctttgcaggagttgcaaaggggttggcttgtttactcagcccacagctctcaacccctcatgggaggggaaactcacaggtgagtgggtgtagggatcaggatgagggcttctgtgtgccagcaggagtagaactctgtgctgccccatggcaacatctaggggagttcccatgacccctcaagccccagagggtgagtgttacagtgtgctcttttagcttttctatccacagatgacttaagtatttaacagctcagtggagggtcagggtgacagccttttggacctgccttcttggtacctcagttcttgtttagcgtccaggaagaatcaggtcatgcaaacaaattgaagggtagtgaatgtggaggattttattgagggatggaagtggctctcagcgggatagggagctggaaagtggatggaatgggaaggtggtattcccctggagttcagacaaactcttctccgaggtcccaccatcaagctgtccctctgagctcaaactgcttctctctgacatccggctgcttcttcttttctttctttctctgtcactctgctattccgctgctctgctgctctgccactctggtgatggggcctgtggtttttatgggtagaggatggggtgtggggtgggccaaaaagcaacatgtgagtgggaaagcaggaaatgcatgttctcattttggtctgtgatcccaggcttgaggatgtgtggctcttgcttgggacagccctcttctgcccagtatttccctgcttcccacccatatcaccaacactgctcctaaccctactcaaaaggtacattaaaatatagaggtggaaagttatatgctgcttctctcagagcaaaccctttctctcttatgtaaaataactaactttcctccacagcataatttaaaaagaaaactaatgatgacattagtcagaaatctgtagacatctctactcctctagtaactctgaaaactgggtctgctaatgagttggtagcattaaatctgaagactgaaagttttctattctgttccttctctttttacccttactttagtggaacagtaaatttcagtaaaatcagtgaaggtgtat

SEQ ID NO: 6798 - DNA, 98850 bp, Homo sapiens
  misc_feature (1)...(98850): n = A,T,C or G, or insertion/deletion polymorphism (see Tables 1-2)
tttctgctttaagctcaccaacgcccaacatcagctttcaggaataggttgaaaaagaagggtaaaaatgagtgtcctcagttggtccagtcagcacagcacagaagagagcaggaatttcatcaccacatggtcaagacaaggcaaataccggtaagaatctgagccaggcttgcctgggcataatgtcctcagattaaaaagatgatacaatggcagcagggatcttagtgataatagccatcaatgtgagtcatgctgcttgattctggactgactgctctctacatcaagaagcacaactgtggtgctggaatcctacttgaccatgctcccagaaattcctcttgcctatcctctatgttgattatcccattttctacattccaaagtgttccatttcctggttttatttttgtttctgtggagcacatcctaacttcttgaaaagggtacatggaaggtaaatgagaccctggatgtctaaaaatggctggctccctctatttgtttgatagcttgtctgagtatagaattgaaagctggaaataattttcttttcaacattttgaagtagttgcttgtctgtttgcttttaccattgctattaagttcaaagcagtcctggtaagtgatcctctgtatgtgatgtattttttctctctctccccagaaacttacagaatcttctccatgaagattttgaaatgttagtgatgtgttgataatggatttatttttatccattgtactggacactcagttggcccttgcaatctggacacttgtttccttcaatttgggaaaaaattttaaatgatttcattcatgatttcctccctcctccattttcttttttctcccttcctggaacttttattatttggatgtttgaacttctaaacatgttctcttccttttttctgtactattttccatttgtcttttttttttaagcatggagtttcgctcttatcacccacgctggagagcaatggcctgatctcaactcattgcaacctccgcctcctgggttcaagtgattctcctgcctcagcctcccaaatagctggaattacaggtgcctgccactaagcatggctaatttatgtatttttagtagagatggcttttcaccatgttggccaggctggtctcgaactcctgacctgaggtgatccactctccttggtttcccaaagtgctgggataacaggtgtgtgcctctgcgcccagccttttatttagttgtatgggggattttctcattttcttcttccaagtgttctactgagttgttcatttctgctcttcctggacagttaattttgaccactcagattgctctcagcatagctggagactactatagagatgttaaaaatactcaaaaattataatagagtagcctgggaatgggagtaggggctggagaccaggaaggaatcaaagatgcacaaggcaacctttgtggatagtggatatatttattgtcttgattgtggtgatggcttcattgtgtgtgtgtgtgtgtgtgtgtgtgtgtatgtatacatatatgtatatatacaaatctatataattagtatagatactatatagtatatagtatgtagttttcccaccacttagccctgttcttagacttttgctggcatttctattacttgcaaaaatatattaaaatatatattgacaaacagaggtagccagccatttttagtatatagtatactatggtatatatatctaccatatactacatagtatgtactatgtagtacatatatagttatgtactatatatatctactatatactacatagtacagtatgtactatatgtactatatgtactatgtagtacatactacgtagtatatagtagatatatatagtatatagtacatagtaattccttttatttttgtttctatggaaacaaaaatatgtatactatatattatactatatgtagtatatattatagcacatatatatctataaatatgcatatatagatgtgtatatatatgaaccaaatttatcgaattatactttgtaagtgtaattcagtgtcaattctacttcagcaaaacttaaaaaaataatagaaatgccagccaaagtctaagaacagagctaagagatgctgaaataacacatggaagtagaaatccatctaaaccacaaggctgccaattcgtgggtaggataggtgactctacctgtcctcagtcgatggctacacagaacttggggtatgcctctctggggaaggaaccctggaatatacacttgaatcaatgaaaaaatctgaaagacacttgccgccagcatagcagtgaagccatgaccttttcttaactgaaggtcatacatttactgcttttctggctcctctttcctagggaaaaaaatacttctacattaatacttgttaaattgtacttactactagttaatgagctaattcacataacaagcatattatgtaggcattttttctttccaagttcactgattcttgctttcttgaaattttctgttgttttacttcaaattgcttttctgcttgcttttgtctcttatcacttctgagctgttttacttcaaattgcttttctgcttgcttctgtctctatcacttctgagctttcttccaaagtctggtcattcttttctgtctactcttatgaatgaaaagacaaaaaagctttttagatctgtatacgtgggtgaagcatatagactctgggcttcacttagggtgctctgggtgggcctttactggggaacctctgatgtcactatcttggattgctcctcctgggctggtcagttcctcagagttgagtcttccagtcttctaaggataagaggaatgcgggccctgcatccagcattatgtattcctaaattcacttaactttgtttccagtgtgcttctctagaatgcctgaggatgccccagtccagggactagtattactttgtccagaaataaacctctagtcttctatgggagtaagggggtagagttacttagaggtgtttctcaaatagctttcatgtagtccacttccaatttcagggtgcgtgtttcagtgccttttgagaattctgcagagtgaattgggtttttctggtgtgctaagtcacattcattcacctgttttccagcttctgagttttattgctgttacctcctgtccccatttttccaatttatttttatatcattttactgtagatttagtagttttggaagggagtaaaattagatgagggtatttaacccactatattaactacttcattctttaaacttccttttttttcttttggcagagagccattagcagcgtgaaataatcttactaagaatgattcttaggctgggcatggtggcttgtacctgtaatctcagcactttgggaggccagggctggaggatggcttgagctcaggagtttgagaccagcctgggcaacatagtgagtgagaccttgtctctactaaaagtaaaaaaatattagccaggcatggtggcgtgtgcctgtagtctcagctatttgagaggctgaggtgggaggatcgcttgagcccaggaggttgaggctgtagtgagccgtgattgttccaccactccaacctgggaaaaattcattttgagaccctgtctcaaaacaaaacaaacaaaaaacacctcttcggaaccatgttcttttcacataatttaaaattaaatatacatagatgtaatttcgaattgcaaactataacctgtttaatgcctaacagcacagcttcatttaattcacaatttgtaacttgtgaaagctttcagggacctggcttaagttgtcctttttagttgttggtctttttacaaattatgtatcataaaacacttgcccagcaaaaatgtaactagtgtggctatggcaaatttgttcttctttgatatgttaacttatatgaattaatgcagtttatctttttttttttttgagacggagtcttgctctgttgacccggctggagtgtagtggtgcgatcttggctcactgcaacctccctctcccgggttcaagcgattcccgtctcagcctccagagcagctgggattacaggtgctgatcaccacgcccggctaattttttgtattattttagtagagacggggtttcactgtgttatccaggatggtctccatctccagacctcgtgatccacccactttggcctctcaaaatgctgggattacaggcgtgagccaccacaccaggcaatgcagtttatctttatgcagttgaccttgaagcatttaggtttactttagccactaagagaaataggtctccttgggttcacaatgtagtgaataaacaattttgagttcagcagggccctgaggctgctcctgaactctgcatgaagtcatggaggttactgttttaagtaaagagccaagagttaaggactaagagaagccccctattattctgaaaacttggatgtgtgcgctggatgagacagcggttgcagtccccattgatagttttttccccctgtcattctaggctaaggagttaggacttaaccagttccagttccaggctaatggaaaattgtcattttactgggggttatgtggtggccaaagttgttaatcattgttccccatggggtagatacagtgagagcttcagtaaagcctttcctctaaaagcccactattttaaggtaacttgggattactgaactatctccttaccccaatgaatcctaacttgagttgactgaggtgttttatcattaaacattagttttactgaaactaatttaaaaggaagccttaactttcatatcaaacagctatggtaaactgagtaagaactctgtacgaagtcgctattaaaatgtttttatcttgctaccaggatatggatgtaaaatgctaataactattacacaacctataatagttacaggttacaatagggataataacactttaacccacaaagactagcttagtcctactacttatctatgaataatgcatgtagtcaataacactggaagggatagagcattataaacttataattcagagatgagaaatggtgccagtaatttaaaagtatttcaggtctcataatgctaaaacagggtgtaggtatgccctacaattacagagaactcagtcgggcttgaggagaacagcctcacttaattgtagttttcctgtcggtgtaaggtgccggcgtttcttcatatgggaggagactgaaattctaaaggttgtgtggttagtacaattagtctgtgacctcgggaaactaatgagtctttggggcctcagcgatcttcatgttaaggaatattttagccaggaattgcttcattttcaattcttgttgagggcgctcttaggaaaaaggacgcgtacgctgcacagaaagtaaacaatagagcagaaagaagaatccgaaggtcattaatcttaaaataaccaaccctctggagccaacttatttctctctttaaattgccgaatgagccccatccccctgctggcttaaaccgcagaggcccaggcctcccaccgggtgtccgctgcatgaaccagtcgcatgcctgtttccttctcgaaaccctcacagaaagacccaacacactctaggaaataaaccgtcaacgtcaggagacgctcagaaccctcttcccacacccggtggtcctcgcccagagcatatttcgcctccagaccccaggatccgggaaatggaacaaaactccccggcggcggcactcacgcactttccggcacgccggagccgcaaaagcctcgaccgctacgactcctctgtccgtctactgcgaagcggggtggcgttgggggaggtgggcaacctgtcagtaaagggggcggggcgccggccggaagagcctccgcgcggctgcgctcttttcctggagctcaagtgggcggggcctgtcgtccgggcaacccgggagmgtttgtccacacaatttctgctccgactctgcggactactgcagtggagcttgactcttaatggtgagcaaggcaaatgaggcagacaggtggaggggcgaccactgattctgyttcaccagtgttaaataatgtaatcaagagccagtcatattttacagcgaagcgggtcggtttgggaaataactcataccttggggtgggtcggccctcttctcagcaatggctttccttacctggaccaggcggacaggtaggagtcccaaaccagtttctgcaaacgggagatggtyaaagctgtcacacggtatcctgatctcgaatgttgctaagcttgaaaattggtcccaacctagtaactttcagtagtgatagacgttcccactaaattttcttattgcaacttggcggaaatgttttagtacttctccagcagttaattaaaagctaatgcaatttactctgctttgaaaaaatattttatgtcgtcttttgtgggaatatgaattgttttgtgattcaaggttctcatcctgcattagttaaatatgataaggcttctcattttgtttttctgcactcctcaactgccatgttttcagcaaggagacaggccaacatgtagctatgagagtatctctgattttcttaaatgtggtttccatcaagacattttctataattaaaaccagaggaagtggagaatgtaattacttatttaattcattaattaagggaaaaatgtggagtgcattctttgtacttggcactgggctagaagccaagaataccaagaagaacatgacgacaactctgcttataggatacagattaaacaaattaattacaatacagctttacaactgtaacaattgaagcatctaaaatggggtaacacacagttggaaatgatgaaatttcagtgaggggaaacaagggaaggagagtggtgcttttcaacctgttttaaagtataaatacgagttttccacatatggtgggaagaaatagggagtggaggcctggcgcggtggctcacccctgtaatcccagcactttgggaggccgaggcgggcagatcacgatgtcaggagttcgagaccagcctggtcaacatggtgaaacccagtctctactaaaaatacaaaaattagccgggcgtgttggcgcgcacctgtaattccagctactcagggggctgaagcaagagaatcgcttgaacctgggaggcggaggttgcagtgagccgagattgtgccactgcactccagcctgggtgacagagcgagactccgtctcaaaaaaaaagagaaaaaaagaaatagggagtggagagcattcctggcggaatgcaaatggaccttaagtcaatttataattgctaataaattgggggaacagtaagcacttacttgttaccttccaatttgttacctgagtttcttcttcttcagatccttctcccaatgtttctcaaagtgtggcccatggaacatttatttctaatgcacccggagtacttgttaaaaatgcagattccaggaacccactcaactccaaatctactgtattagtttcctaagtctgccaagtaaggaattgccacaaactgagtggttaaagaaaagaaatttattgtctcgtagttctggagactagaagtccaagatcaaagtgtcagcaggtctgtgatacctctgagggccttagggagagatctgttcagacctttcctggcttctagtagtttcttggtttgtggcaacaaaacttcattcttcacatggcattctccatctgagtatattaaaattattattatataaggacacaaatcatattggattaggggcccaccctattcagtatggcttcatcttaatttaactaataaaatcagcagtgatcctgtctccaattagatcaaattctgaagtactggggatcagaatttcaacgtatgaattttttttcttttttttttttctttttgagactgtctcgctttgtcacctaggctgcartgcagtgtcaccatcatggcttatcgaagtctcagcctccctggttcaagcaatcttcccaactcagcctcctgaatagctgggagtacaaggcacgtgccaccacacccagctaatttttaaatttttttagacagggtcttgctttgttgcccaggctgccctcaaactcctgggctcaagtgattctcccactttgacctcccaaaatgctgggattacaggagtaagccagtgcacccagccaacatatgattttttttttttttttttttttttgaggcagagtttcgctctgttgcccaggctggaatgcaatggcgcgatctcggcttactgaaacctctgcctcccgggttcaagcgattctccttcaagcgattctcctgcctcagcctccygagtagctgggattacaggtgcatgccaccacgcccagctaatttttgtatttttagtagaaacgaggtgtcaccatgttggccaggctggtcttgacctcaggtgatccccctgcctcggcctcccaaagtgctgggattacagctgtgagccaccgcacccggacaacatgtaattttttgagcaatacaattcagcccataacatctactaaaccacagtgtaggaagagaagtgagcatacacacgtttagtccataaatatgcatttctaacaagcttcccatatgattcttatgccctctgaactttgagaactacttcactacatagtggctattatgacatataggagaaatgaggatatgtacttaccccaaacctgatttacattaaaagcacaagtgagaagtgacaatttgcccctctttaaaatatggctaattgagaactggagcaatgctatttacatattcagctgtttagtacttatttcacgatggaagtatgttaactattaattgatagaagctatgataaaaatagaatctatttgtaaaaattatatggcagcaaagtctctacttttctatctccagtgcctcagattgccttgtgtgtaaatcattaattaatatctgccgagtgaattagtgtaatatatgcactcttcaagaagatggaatctactgatatgtgttaaacttcagttttacacagtataatcttatgggttgaactaatatttcccatgtataactcttcaaatatgtaaagtgtcttatgttcacatgatctcctataaattccttaccagaaatctgataaacacatgagcctaatcaggaaagtataagtgatattattgtaactgtgagtcttttttgaaatcctgtgctttccaaaataatttccagaaaagaatagatstgccttaaaacacattgctgaatagaatcttcattttatcatagctttacctgctttatttatttatttatttgtttattttttgagtcttgctctgtcacccagactggagtgcagtggtgcgatgttggcttactgcagctccgcctcccaggttcaagcgactctcctgcctcagcctcccaagtagctgggactacagacacatgccaccatgcccggccaattttctgtatttttagtagagacggggtttcaccgtgttagccaggatggcctccatctcctgaccccgtgatccaccttcctcagccgcccaaagtcctgggattacaggtgtgagccaccacacccagccgcctgttttatttatttattcattttttggaaatgcggtctcgcttggctgcccaggctgagtgtcatggctcgctgcagccttgacctcccgggctcaagtgatcttcccacctcagcctcccaagtagctgggaccacacgcatgtgcttggctaatttttaaaattttttgtagagacggggtcttcctgtgttgcccgggctgatcttgaactcttgggttcaggtgatcctcccgccttggcctccgcgaatgctattacaggagtgagccaccgtgtgaggctactttgcgtgctttaaataactgattccctttctataaaaatcatcaatctaactttacggaaaggttatttctttatgagatcattcccacacttgcaaatttgacattagtgccaataattggtcaatgatttattgtcctttgaaccctttaaactagtgccttcttgactagtactctgtttagtaacagggcatttcattaaacatggatcattgattgtcctaagaaacagtgtaaaatctacatacaaaaaaatggttcagtaggtgaacttagtttttctatacttatttgtagttttgtctgaactctttttaaaaaagcattttattttgggataattttagatttgcaargaaagttacaaagatggtacagagagttcccttatgccctttaccaagcttcttctaattttaacatcttacataatcatgatacttttgtatcagaattgtctttaaaattgatcaattcttttgttttccaacttttagggtcccaaagcaaaaaaggtatgtagaatttttttcaaaatagatagttrtataatcacttacagtgtatgaacagaatatttacagaattataaaatatttttatagttttagtttgtagagtttactaagcttactttttagacattaatgcagtttaaatcatggaataatcctttacaacagtaggacgcatttcaaatttgacataagagagttctaatttcacaaatactcttaaaaatagcttttaatttttacttatgtctagatttggggctttttgttaattctgctctagaaaatgttggattaggaacccctttttcttcactctagatacatatataaaattttaattataaaatgtgctatggctttaaagtgaaatctgaggtaatacaactttaaatgggttgcatggtaacacatacttggtgggtttttttgtactgtttagaaatttgagttcaataaacaatgtaccattctatatgcctttttccagaatgcctttttctctctttactttgtagatttatactttaaattagagtttataatccattggctggcagtccaaatttaccctacagacatattttgtttgaccttagaagtgtttttttttttttttttaaatcagttgccaacctatttttatgcaacaatctgatttccatctattcttaagaaattggaaacctgataacattgggcctaaatagtcctgtaaggcaacaattggctgggctgaataacagctaccccttttaggaatgcataaaatctttgatttgccatagtcttgaccataaccaaacctcttagtttatttacctgcttggtcccaacagggatttgggtctggaatgcctgctttaaggcatatctcaaatgtcacttctctgtaaattttcccattgttcccttttacagatcaattatactctgtattttcttggttttgttttgttttgtattttagagacagggtctcactctgacacccaggctggagtgcagtggcatggtcttggcttactgcaacttccaccttccgggttcaagcaattctcccacctcagcctcttgattagctgggattacaggcacgcgccaccatgcctgtctaatttttgtattttttggtagagacagggtttcactttgttggccaggctggtctcgaactcttgacctcaagtgatctgccggcctcagcctcccagagtgctaggattacaggcatgagtcactgcgcctggcttatactctgtgttttcatagcacatgcattcgtgcatacctcaattataaccctttatcattttattgtaattatttataatggtgagcttttcatggtcaggagcgtgtcatatttttacatccataatgtttagcacagtgcctggcacatagtagaaattcattcaatatttgttgaatgaatatgcgaaaccccatttaatctaccacccttaaaaacacttgggctctttccaggaaatgtttatrtacagtgtattcagtatttatacagttaaacatttcttcaagaaataccattgagtgccttctttgtttgcttctgtcagtcacttggacccatgaccaacctgatattcttttagaaactgtggatataactgaacaaaatttatgaaggctctggaagcattcaagcattctggagggcctgtgtgtctctgtaatcattcattgatttgtgtggacattcattttgtgctttagactatgaaatcttagaggcatcattttaaatccgaaaactcattgttttaaattaccttggtacttcatgatatacatgggtgggctattacgttgatagtattgtttctctgaaagaatggtgagattcttcctatgaaatttgaaaccaaacccagagaagaaatcgcttactttttttttttttgagacagagtcttgctctgttgccaaggctggagtgcagtggcacaatcttggcttactgcaaccttcgcctcccgggttcaagtaaagaaatcacttactttttaattatttcacttttaaatattgcagtttggagatgaggtgttctgtaaagggaatttacagtgtaggtaggaaaacattgaaggatatattttatactttctggttttttaaagttttcttaagggaaaattaatgaacacacatggtacaaaattaaaatagcattaaaaaattgaaacttttcttcaacccaagacatttgatctgccttcctagaaccactgtacatcttttcataaattttctaaacattaaagggcgcacatatgtacacacacagagaccccttttctccctgcctatgggagcattctgcaccttctgtttttcacttaacaatattttattaattataggatactaatctttttacatttgaacattactgaaattgagatgtgtcttataatagtatcttacaatcattgtagtcctggattgacatccacttcttcaacagaagatgtttgcttctatctgtcagttgggcttattaccagtctggtactacttaaattctatgcttgagggttttggaccacaccaatggtatgagtcagactgcaaatccacatgaaccggcttgtggtttaaattctcaggaattttttttcttccttctaccagtgtcagagttgacatatgcaagccttctttttttttgctctgcattactgtgttgtgggattgtttgtctttccctatatccagttttatacaggtatcgcctttaactgccatcttaggcattatttccttttttgggacataataaatacatcttacatctgatgacatcttaggttcaatggagtaagtataccttggggacctttttgttttggcgtattgaaattacctcactctttttcatggctgcatcatatctcattgaaagtatgctacatgatttttatgttggccctattttttgctatcacaatcaaggcaggaatgaagatccttatatataagttcttgcaaacatggaagaatatttatttcattgatttagcagtgttcaaggcattaagtgaacagcagcaagaccaagttcctgccttcatgaagcttacattcaacttgagggtgggaagtgagacaggaatataaataatataatttcaggtagcttttaatacatagaaactaagaggtcatgaaaaaatgtggggtagggctgatgatgatgctatttcatataatatgattaaggaagtaaaatttaagaagagacctggatgaagcaagggagtaggttagtaattacctgggggaatgagtatattaagcaggagaaacagacatagtttagaatgaccttggtgaaatgccagtgtggttagaacagacagtgaggtagaaagtgaaagataaaaacacggcatggagaccgtggttaatcaggagccggtttgtagttcatggccaagtaagccatggtaaagtatttgggttttattgtgagtgtgatgggcagcctgggaaagttgtaaayagaaaagtggcatgatctgatttacatttttaaaagatcactttgattgccatgtggaaaattcactgtagggggacacaagggtaaaagtaggggtaccctttaggaatccatcacagcagtgtaggttmgaagtcttcaaactgagaagtaaatcatactctgacaggtgtacaaaggttttctaaggatacaaggacacagtcttatggaaatcaatcttcagatgattgacttccatatttaccttttcctgagaaaatgtagtcatacattaaaaaaaaaaccctgcctttttaccattgcatcctcctctgtcacaatcacccttcttacaaagtaaagcttatctgttatctactcccattctgtgattctttgcccttgggactgggatgtgaaacctttagacaattcgaaacattgatgttggcaaagctaacatcagacactaaggacttcctgtttttgtctgccttacctgtctttttggaagtggtgaaatgtgtcattagaagtactgagatattgtgaatttatacacatggtagtgtgaagtggtgatcatttttgtttagttacattgcccatgagattgttatcaaattatggtaccaaagagtgtatcaagttacattgtgagagatttttttggtactatcatttgataataatgttttggtaccagactacaaagataatgtaattaattttttaatgaagaaagattagtgtattagtaaaaatgtgagtgtaatatttttacgcagatttcaaagttgccttttgaaacttcacgtaatttaaattaatattgttcattgcaaaagttagaaaattgcgtaagactatagaaaaggttatgatacctgatgtactgttaaaaaacccatcactacatttatattaatatatttttatcagaaaccactgtacttcacagaatacatgaaatacagaaaacagtgattagactatgagaagaattgccttacaaattgatgaatatatagatgattccagttagtctcagttaataatttatgacttttcttccaatgaagaaaatggcattattaatacaaatttgatgttcaaattactgtttaggaatacaactgtgaagagattttacaaaacttttaatactttatttgaattgattgtattttatttgattgaaatcatgctcaactacccccaggaatgggactgtaatgaatgggcaaaaggggggtgcttattgctatagtctgtactttaaattctattttcatttaggaacactgtcatcacaaacaggcttcagtggccaaagagtgagtcctggttttcatggaacattcagtgctgacactaaaatataaatggtattgagttcaggacattaaaattgcatcttttaaaaacaatatatgagggaattaaatcaatttacatctggcttataatcaaaaatgagataggttgccatgaacatgcatatcaacatatttatttgtaccaaaaaatgaagtcagactgtctgatagaaagtaagtctaatatggccatttagtttaagttcgaaaacagttttgccaattaggtaaatggtagacattttttatacttcaaatgagctaaatctgcagctttaagattttggtgaaagtgatatgataaaaaaattatcagaaataatattttgatctttctgatttcattaatttgaggcttaagattttygggactgccatttctgctaaaaacaataaatagtgctcactacartgtatacagatagatcaaagctatcatcttaaaaacatttaagaggcaataatacaggaagaaattatcaggaaaaaacctgagtgaagacataaaccaaagaagtaatggaagcactacaactgtttttgttttttgtttattttattttattttagagacaggatcttgctgtgycacccaggctggagtacagtggtgtaattacagctaactgtagcctcaacctcccaggctcaagtgatcctcccacctcagcctcctgagactacaaccatgtgctaccatgcctgggaatttctttttctttctttttttttttttttttatagagatgggatcccactgtgttgtccagggtggtctcaaactcctgggctcaagcaattctgctttgacctcccgaagtgctggaattgcaggcatgagtcaccatgcccagtccaaagcaatttttatcatgagggtatttgcagagctgggcagaacttgagctttggtcttcatagcaaaaatgaaagccagacagtggaatgatgtcttcaatgtgctgaaagaaaatagctgccaacttagaattctgtaccagctaaaataagttttcaaaaataaaggtggaataaaaacattttcttacaaaccaaaactgagtttgccacctgcaaaacagattatgtctgtacagtataaaacaaaaaccataataaaaaacatgtgggtttaacagtaattaaactaagatacatgacaacaaacaacccagatgttcatcagttgattaatcaataaacaaaatttggtatatctatgcattggaatattatttgggcataagaaggaagtactgatgcatgatatagcatggatgaacctcaaaagcatgctaaatggaagaagccagtcacaaaagaccacattttacatgattacagttatatgaagtgtccagaagaggcaaatctacagagacagaaagtagattcatagtttccatgagctaggtatttggaagaagtggagagtaactactaatgagtataagatttctatttcggggtgatgaaaaatgttctaaaattgattgtggtgatggttacacaactctgtgaatatactaaaaaccattaaattgtgcactttatatgggtgaattacatggtatgtgaattatatctcaataaaactattgttaaaaacatgcatgataatactaatccataatttggtaggggaaggacagattgagttaagacattctaaagtccttgggaaagaggatacaggtctggatatagaaggcatatttgttgactttctgtagtagccattaaaattacacagtatataacttctcaactggtagagagaacatagtggaataataaaaaaaaatcagttgaaaagttaccaagaaataatacagaataacactcaaaagtaagatagtatatttaagcccaaatatatcagtaaatacatggaatataaatggatctattactcttgttaaaagtgaaagattgtcaataataaagaataaaatccaacagtaatcttcttacaaacagccaccttaagaataaagattccagcaatatgggagactgaggcagaaggatcgcttgagtccatgggtttgagaccagcctggacaacatagaccccatctctacaaaaagtaaaaaattaaaaaaaaaaatttaaatacagaaaagttggaagtgaaatgatggaaaaagtcatactatacaaattactagaaaaacaaaagcttatatagctgtattaatattagacacaatagactttaagacaaaaagcacttctagaaataaagagggacattttgtggtgatcaggatttttgtttatttgttttgttttgagcattggtttcagcagaagcccaaatcccagcattacccaatatacccacgtacaggtttgttacatggggatattggatgatgctgggattttggcttctggtgaaaccattgctcaaatagtgaacttagtcccaatacgtagtttttcaacccttgtccccgctccctcccctcttttagagtccccagcnnnnnnnnnnnnnnnnnnnnnnnnnnnnnnnnnnnnnnnnnnnnnnnnnnnnnnnnnnnnnnnnnnnnnnnnnnnnnnnnnnnnnnnnnnnnnnnnnnnnnnnnncattttccttctttccttcctttctttctttctctccttctctccttcccttcctcccttcctcccttcctcccttcctcccttcctttcattcctttctttccattcttcttttcacttcatttcctgggctgaagtgcagtggcatgatcttggcttacagcgggcttgacttcctgagctcaagcgatcctcccacctcagcctctcaggtagctgggaccacagacgtgtgccaccacatctagctaattaaaaaaattttttttagagatgagatcattctatgttgcccaggctggtcttaaactttggggctcaggtgatcctcttaccagggcctccgaaagcactgagattacaggcatgagagccaccacatctggcttgtgtgtgtgtgtgtgtgtgtgtgtgtgtgtgtgtgtgtgtgtagacagtctcactctatcactctggctgcagtgctgtggcacgatcacagctcactgcagcctcgaccctcccaggctcaagcgatcctcccacctcagcctgagtagctgggactataggtgtgtgctaccacaccctacattttctttatccaatccactgttgattaggttaattaggttgattccatgattttgttgttgtgactagtactacaataaaatactagtacaggtgtctttttttttttttttttttgagatgaagtttcgctcttgttgcccaggctggagtgcaatggtgcgatctcggctcactgcaacctccgccccccaggttcaagtgattctcctgcctcagcctcccgagtagctgggattacaggcatgtaccaccatgcccggctaatgttgtatttttagtagagatggggtttctccgtgttggtcaggctgatctcaacctcccaacctcaggtgatctgcccgcctcggcctcccaaagtgctggaattacaggcgtgagccaccgcgcccagcctacaggtgtctctttgaaaaaaaaaaaaaaatttcttttcttttcagcagatacccagtagtgggattgctgggttgaatggtaggtttattttaaattctttaataaatcttcatattgttttcaataggggttgaactaatttacattcataccaacagttcccttttttctgcatcctcaccaacatgtccctttttttaattttttaatagtagacattctgactagtgtgagatgatatctcactgtggttttaattgaaatttatctgattagtgatcttgagcatttgttcatgtgtgttgccacttatatgtcctcttttgagaagtatctgttcatgtcctttccccactttttaatggggctttttttttcttattaagttccttatcgattctgggtatttgtcctttgtcagatgcatagtttgaaaatattttctcctgttttgtaggttgtctgttgactgtgttgtttcttttgctatgcagaagctctttagtttaattaagtcccattcatcaatttttgtttttgttgcaattgcttttaaggtcttagttataaattatttgcctaggccaatgcccagaagagtttttcctggttttcttttagggtttttatagtttgaggtcttggctggatgcaatagtgcacacctgtaatcccaacactttgggaggctgaagcagaaggattgcttgaggccgggagttcaagaccaacctgggaaacatagtgagacccccccacctctgcaaaaaatgaaaataaaaaattagccagatgcagtggcatgcatctgtaattctagctactcctgaggctgaggtgggagaattgcgtgagcccaggagtttgagattacagtaagctatgattgcaccactgcactcccattctttcctgaatgacaaagcgagactctgtctcttaaaaaaaattataggccgggcacgatggctcatgcctatagtcccagcactttgggaggccaaggcaggcggatcatctgaggtcaggagttcgagatcagcctgcccaacatggcgaaaccccgtgtctactaaaaatacaaaaaattagccgatcgtggtggcaggcgcctgtaatcccagctactcaggaggctgaagcaggagaatctcttgaacccgggaggcagaggttgcagtgagccgagattgcaccacacactccagcctgggcgacaagagtgaaaaaaaaaattatagtttgaggtcttatatttaagtctttaatccatcttgagttaatttttatatatgttaagagttaggggtccagtttcattcttctgcaagtggctagccagttttcctagcatcatttattgaacccagtgtcctttccccattgtttgtttatttttgctaactttgttgaagatcagttggttgtaggtgtatggctttatttctgggttctctattgtgttccattgatctatttttataccaataccatgttattttggttgctacagcctgtagtatagttttgaagtttggtaacgtgatggctccagctttcttctttttgcttaggattgccttggctgtgtgggctcttttttggtttcatatacattttagaattgttttttctagttctgtgaaaaataacattggtaatttgataggaattgcattgaatctgtagattgctttgggcagtgtgatcattttagtgatactgattcttctaatccgtgagcatggattatttttccatttgtttgtgccatctgtgatttctttcagcagtgttttgtagttctctttgtagagatatttcacctccttggttaaatatatttctagatattttatttttgtgtgcatgactgttgtaaatgggattgagttcttgatttgcttctcagcttaaacgttgttggtgtgtagaaatgctacttgtttttgcatgttgtatcctgaaactttactgaagtcgtttatcaggtccaggaggtatttggaggaatctttaccgttttctaggcataggatcatgttgtcagtgaacaaagataatttgactttctcttttcctatttggatgccttttattgctttctcttgactgattggtatggctaggatttccagtactattgaataggartgatgagagtggacacccttttcatgttccagttcttagggggaatgctttcagcttttgcctattcagtatgatgttggctgtgggtttgtcatacatagatggttcttactagtttgagatatgttcatttgatacctagttttttgagggtttttttttttaatcatgaaaggatattggattttatcaaaagggttttctgtgtctattgggatgatcatatggtttttgtttttaattctgcttatgtggtaaatcacatttattgatttgtgtatgttgaaccatccttgcatgatgataaagacttgattagccaaggaaatctaattttaaatttgtgtatacctacttacaaagccttgaaatatacaatgcacaaattcagggaactacaaggagaaatagacacatccacaaatagacacatccacaatcatagtggaagattttctctttcaataattaatagaataatgtttaaaaaatcagtaaggatttagaagattggagcaacatgataaacaaacctaatgaattaaacatatttagaacaccacaccaaacaagtagaggattctaagcacgcaaacrttttcccccaaaattgctagtatactatgatacaaaactattctcaaagttcagtgcatgaaaacaattcagagaatgtatcataatgaatattatattgaaggtaaaaataattcagtagcaaacaggaaggtacaatatgcttggaatttttaaaacattctaaaatgggtcaagaagtaatataatggaaattagaaaatattttaaacttattgttaaggaaaatacttaaaaatttgtggaatgtatgtaaagcaatacttagagggaaatatgtagacctaaatatttatattagaagaagaaaaaaggctaaaaattaatgatcctaggtatycttctcaagaattcagaaaaagaataaaacccaaaggagaaggaaggaaataataagaacaaatatagaaggaaggagaagaaaggaaataataagaacaaatatggacattaatagaaaacacagaatagagtgggtcagtaacctcatatccttcaagtcttcacttaaatgccgccttctccatgaggccaatccaaaccactgtatttagaattgtgatttcgtccctttcacaactacaccagccatctggagtccccctactttcttccatatcacttatcactccttaaaatattgtataatttattttaaattttagtatattgtttttgccttcctgtttacatttgaattgtaagtgcaaggatttttgtttacttttatatctcaaataagaggcacatgttagcctctcagtatttattaaataaatgaacaagtcacagtagatttctttgaaaactgataaaattgacaattatctgatatgtcaagaagaacaaaaggcataaatrataaatattaagaatgaaaagggagacatgactttaacaataaatgacattatttgagcaactttttatgccaatatattagaaaacttagatgaattagacaaatagccagaaaaaaattaaactgttttcatgaagaagtagaaaacctgaatagtcctataatcatttaagaaattaaatcagtggttataaatattcccagaaagaaaattctaggtccataagtctttatatgctagtttttcattcagaggtaaagaaataatttcacacttaatacagattcttctagagcatgacaaaagggggaacactccttaagtcattttgagttaaatggataatctgaagatattatgagaaaggaaaatggaagtgcattcatgacacaaatacaaaaatcctaaacaaaatgttaccaggctcaatctggaagatgataataaatcatgacacaattcagtttatcccaggaagggagagttggtttaatatgagaaattaaataaatacaattagattgaattagaaatgcatttaatgcactttaccatttgataggttacagcgcactttcttagtctgataaagatgtctgtattttttaacaccttttagatgagcaaaagtgctgaaattagcaaatattgacttggataataattgtgggagtgtaaatttgaaataatgattgtggaggtgtaaattagaataactactttggacagttcatctttagtaaagttgaaaatgtacgtacccatcagttttatttctagggacatacaacagaaaaccccttgcagacggacaccaggatagatatattcaaaggtttatagcagcattaatgatagtaagaaaccagaaacaatccaatgtctagcaatagaaaaaggataaataaatcaatggattactattcagcaatgaaaatatacagccatagcaatgtccatcaacatgaatgaattttgcaaaccataatgtatatctaaagaagtaaatcacaaatgagggcaaatattgtatttttccacttagatatctagagtagtcaaactcatatagacaaagtagaatggtgagtgacagggctaggggcaatggggagctattgtttaatggtatacagggtttcagtttgggatgctgaaaaagttctggaggtggattgtgatgattgtacatcagtgtgcatgtgtttaaagccactgaattgcacacttgaaaatggttaaaatgactgggcaaggtgggtcacacctgtaatcccagaactttgggaggccaaggcaggtgaatcacttgaggtcaggagttcaataccagcctggccaacatggagaaaccccacctctactaaaaatacaaaaattagccaggcagggtggtgggcacctgtaatcccagctactcaggaggttgaggcaggagaattgcttgaacctgggaggtggaggttgtagtgagccgagatcgcaccactgcactccaacctgggtgacagagtgagactccatctcaaaaaaaaaaaaaaaaaaagaaaatggttaaaatggtaaattttatgttatgtatactttgtcacaattaaaaaaagcaaatcacaataatatacataaagtcattaaatttatggaaagttcaaaaatctatatttttcatatatatacgtaagaaaactataaagaaaaacaaggaaatgatcacaaaagtcagagattatctgtaggggtaatttttattgtaaatcagcatataatttttggcataggaggtgaaggaattcaaagaattgcatgatgttactataacctattctgattgatttttaaatataaaccaggtttctctctcacatatttataaaaattaaaaaataaaaatagaattaatctgaatttctgtttcattcagcactagctagcatttatccatggattatgagctaaccagaaaaaagaaaaagcccaacatttcatcaagagatgtacatccaggaaaattttagtttttatgtttaacatttagttatcaaaatttataatatgttactttattcagttgtgtactgaaaataagattaactcaatctagagcagaatttttaatacttagagacaaaggaaataaattttttaatttaaatttttattcatatttttataacaaatataaaaggatcaacaaaagtttttcaagtatattacattaggataagattctgtgagggaagtggcgtggaaatatgaactcaaatagaaaacagattaacatttttattttaaaaaagcttgtttatattttaaattggtcattaaatctctgtggtatgtagattctattggatatatccctttttctgagatggagtctcgctctgtcatccaggctggagtgcagtggcatgatctcggctccctgcaatctccacctcccaggttcaagcagttctcctacctcagcctcccgagtagctgggattataggtgcctgccaccatacccggctaattttttatattttttagtagagatggggtttcaccatgttggccagnnnnnnnnnnnnnnnnnnnnnnnnnnnnnnnnnnnnnnnnnnnnnnnnnnnnnnnnnnnnnnnnnnnnnnnnnnnnnnnnnnnnnnnnnnnnnnnnnnnnnnnnnnnnnnnnnnnnnnnnnnnnnnnnnnnnnnnnnnnnnnnnnnnnnnnnnnnnnnnnnnnnnnnnnnnnnnnnnnnnnnnnnnnnnnnnnnnnnnnnnnnnnnnnnnnnnnnnnnnnnnnnnnnnnnnnnnnnnnnnnnnnnncaggctggtctcaaactcctgacctcgtgatctgcccacctcagcctcccaaagtgctgggattacaggtgtgagccaccaacacccagccttctattggatatatcttaagcagtgatggatatacttcaaagagtactgtgaaagttttattttaaggatcatatacttgaaaggacaatattcacagctatttaaactcatgataaaaagttttcagtgacaccttaaaaatgtgtagagccgggcgcagtggctcatgcctgtaatcccagcactttgggaagccaaggtgggtggatcacttgaggtcaggagtttgagaccagcctggccaacatggtaaaacctcatctctactaaaaatacaaaaaattagcctggagtggcggcaggcacctgtaatcctgctgaggcaggagaatcccttgaacctgggaggcggaggtttcactgagccaagattgtgccagcctggcatgacagagcgagagtccgtctcaaaaaaaagaaaagtttaaaagcaaaacatatagttcatccactgcaatgggaaggaaggcagacaaaaatatagataggctcaaagatttggtgtgtaaagatttttctcttctgaaaacttctattttttcagtgacataagaggtaaagtcagcagctgagagtagagtggaagagaggattttggaggtttgaagtgagaatgaaatagttgtgggaattctggacagtgcttagagtctatttttttaatttattttttaaattttattttttcataacttattgaggtacaggtggtatttggttacctgagtaagttctttagtggtgatttgtgagattttggttcacccatcacccgagcagtatacactgcaccgtatttgtagtcttctatcccttgccctccttccactcttccccacaagtccccaaagttcattgtgtcattcttatgcctttgtgtcctcatagcttagctcccacacatcagtgagaacatacaatatttggttttccattcctgagttacatcacttagaataatagtctctagtctcatccaggtcactgcaaatgctgttaattcattcctttttatggccgtgtagtattccatcatatatatatatgatatatatattccatatatatatgatatatatatcccctatgcctgatttctatatctcatatatttctgacctatatcttccctttcttcgatatctatattgcatatgtatgagacgccccccctctctgtgcttcgtctgcgttcttcttcgcgtttttgccggtttgtttgccgtttctcttatttccccttcccagtccgcgccgctcgtgttggtctgccgcctccctgccccacttttcctgccctctctttccctttcctccctctctcgttctttggctttcccccccgcttttcggttcttggcgtgccttcccttcctcccctgcctccctgtnnnnnnnnnnnnnnnnnnnnnnnnnnnnnnnnnnnnnnnnnnnnnnnnnnnnnnnnnnnnnnnnnnnnnnnnnnnnnnnnnnnnnnnnnnnnnnnnnnnnnnnnnnnnnnnnnnnnnnnnnnnnnnnnnnnnnnnnnnnnnnnnnnnnnnnnnnnnnnnnnnnnnnnnnnnnnnnnnnnnnnnnnnnnnnnnnnnnnnnnnnnnnnnnnnnnnnnnnnnnnnnnnnnnnnnnnnnnnnnnnnnnnnnnnnnnnnnnnnnnnnnnnnnnnnnnnnnnnnnnnnnnnnnnnnnnnnnnntatatatattccatatatatgatgtggtatatatatgaatgatgtgtatatatatatgatgtggtatacatatgatgtatatatatatgatgtggtatatatatgatgtatatatatgatgtgtgtgtatatatatgatgtgtgtatatatatgatttgtgtgtgcatgtgtgtgtgtrtatatatatatcacagtttatctacttgttgattgatgggcatttgggttggttccacgattttgcaattgtgaattgtgctgctataaacatgtgtgtgcaagtgtcttttttgaataataccttcttttcctctggttagatacccagtagtgggattgctggatcaaatgatagttctacttttatttatttaaggaatctctacactgttttccatagtggctgtactagtttgcattcccacctgccttctggaagtttttcctgttcaccatatccatgccaacatttagtgtttctttttattttttgattatggccattcttgcaggagtaaagtagtatcacactgtggttttgatttgcatttcccagatcattagtgatactgagcattttttcatatgtttattggccatttgtatatcttcttttgagaattgtgtattcatgtccttagcccactttttgatgggtttgtttgtttttttcttactgatgtgcttgagttcgttgcagattctggatattagtcctttgtcagatgtatacattgtgaagattttctctcacgttgtgggttgtctgtttactctgctgactgtttcttttgccatgcaaaaggtctttaattaggtcccagctatttatctttgtttttattgcatttgcttttgtgttcttggtcatgaaatccttgcctaagccaatgtctagaacagtttttctagtgttatcatctagaatttttatagtttcaggtcttaggtctaagcccttaatccatcttgtgttgatttttgtataaggtgagagatgaggatccagtttcattctcctacatgtagctagccaattatcccagcaccatttgttgaaaaggatgtcctttccccactttatgtttttgtttgctttgtcgaagatcagttagttgtaagtatttgggtttatttctgggttctctattctgttccattgatctatgagcctatttttataccagtaccacactgttttggtgactatggtcttatagtatagtttgaaatcagctagtgtaatgcctccagatttgttctttttgcttagtcttgctttggctatgtggactcttttttggttctgtatgaattttagaattgttttttctaattctgggaagaatgatgttggtattctgatggggattgtattgaatttgtagattgcttttggcagtatggttattttcacaatattgattctacccatccatgaacatgagatgtgtttccatttgtttgtgttgtctgtgatttcattcagcagtgttttgtagttttccttatagaggtctgtcacctccttggttaggtatattcctaagtattttattttatttttgcagctattgtaaaaggagttgagctcttgatttgattctctgcttggttgcttttggtgtatagaagaactactgagttgtgtacattaatcttgtatcctgaaactgctaagttcttttatcaattctaggagctttctagggttttcagggtaaactatcatattgccagcaaacagtgacagttcgagttcctctttaccaatttggatgccctttatttctttctcttgtctgattgctctgcctagcacttccagtaccatgttgaagaggagtggtgagagtgggcatccttgtcttgttccagttctcagagggaatgctttcaacgtttctttattcagtattatgttggctgtgggtttgtcatagatggctgttattacattaagatatgtcccttttatgctgattttgctgagagttttaatcataaagggatgctggattttgtcaaatcttttttctgcatgtattcagatgatcatgtgatttttgtttttaattctgtttatgtgttgtatcacgtttgcatatgttaaaccatccctgcatccctggtatgaaacccagctggtcatggtgaattatctttttgatgtgttgttgaatttggttagctagtattttgttaaggattttagcatctatgttcatcaaggatattggtctgtagttttattttttggttatgtcctttcctgattttggtattagggtgatgctggcttcatagaatgaattagggagggttccttctttctctatcttgtggaatagtgtcaatagaattggtaccaattcttctttgaatgtcttgtagaattctgctgtgaatctgtgtggtcctggacttttttttctggtaatttttaaattaccatttcaatctcattgcttgttattggtctgtttggagatctaattcttgctgatttaaggtaggagggttgtatttttccaggagtttatccatctcttctaggttttctagtttatgtgcataaaggtgttcatagtagccttgaatgtcttttgtatttcagtggcgtcagttgtaatatctcccatttcatttcttagtgagattatttggattttctatcttcttttcttggttaatcttattaatgatctatcaattttatttatcttttcaaagaaccagctttttgtttcatttatcttttgcatttttttgattcaatttcatttaattctgttctgatcttggttatttccttccttctgctgggtttgggtttggtttgctcttgtttttctagttacttgaggtgtgaccttagattgcctgtttgtgctctttcagattttttgatgtaggcatttagggctatgaactttcccgttagcaccatctttgctgtatcccagaggttttgataggaaatttcattactgtcattcagttggaagaatttttcaattttcatcttgatttcgtttttgacccaatgctcattcagcaggttacttaatttccatgtacttgcatggttttgaagatttcttttggagttgatttccagttttattccactttggtgtgagagagtgctggataaaatttcaattttcttaaatgtattgaggctcattttatggcctatcrtatgatctatcttggagaaagttccatgtgctgttgaatagaatgtgtattctgcagttgttggatggaatgttctgtatatacctgttaagtccatttcttccaaggtatagtttaaatccattgtttctttgttgactttctgtcttggtgacctgtctagtgctgtcaatggagtattgaagtcctccattattgttgtgttactgtctgtcttgtttcttagatctattagtaattgtttttataaatttgggagctccagtgttaggtgcatgtatgtttaggattgtgatattttcctgttggacraggcttttttttttttttgagacggagtctcgctctgttgcccaagctggagtgcagtggcgcaatctcggctcactgcaacctctgcctcctgggttcaagtgattctcctgtctcagcctcccgagaagctgggattacaggcacccaccaccacaccagggtaattgttgtatttttagtagagacagagtttcaccatgttggtcaggctggtcttgaactcctgacctcaggtgattcacccccctcagcctcccaaaatgctgggattacaggtgtgagctactgggcctggctgggacaaggcstttaaccattatacactatccctctttgtctcttttaaccactgttgctttaaagtttattttgtctgatgtgagaatagctacccctgctcgcttttggtatccatttgcatgaaatgcttttccacccctttactttatgtgagtccttatgtgttagatgaatcccctgaaggcagcagatagttgattggggagttcttatccatctgtggttctgtatcttttttttctttttttttttttttttgagacagagtcttgctctgtcacccaggctggagtacagtggtgtgatttcagctcactgcaccctccacctctaggtttcaagtgattctcttgcctcaccctcccaagttgctgggatcacgggtgcatgccaccacatccagctgatttttgtatttttagtagagacagagtttcaccatgttggccaggctggtcttgaactcctgacctcaggtgatccccctgccttggcctcccaaagtgctgggattacaggaatgagctatcgctcctggcctctgtgtcttttaagtggagcatttaggccatttatattcaatgttagtttcactctcgtccgtgtgaagagaccaccaaacaggctttgtgtgagcaataaagctttttaatcacctggatgcaggtaggctgagtccgaaaagagagtcagcgaagggagatggggtagggccgttttataagatttgggtaggtaaaggaaaattacagtcaaaggggggttgttctctagtgggcaggagtgggggtcacaaggtgctcagtaggggagcttttgagccaggatgagccaggagaaggaatttcacaagataatgtcatcagttaaggcaggaacaggccattttcacttcttttgtggtggaatgtcatcagttaaggcaggaaccagccatctggatgtgtacgtgcacctcacaggggatatgatggcttagcttgggctcagaggcctgacattcctgtcttcttatattaataagaaaaataaaatgaaatagtggtaaagttttgggacagcgaaatttttgggggtggtatggagagataatgggcgatgtttctcagggctgcttcaagcgggattaggggcagcatgggaacctagagtgggagagattaagctgaaggaagattttatggtaaggggtgatattgtggggttgttagaagaaacattttgtcgtgtagaattattggtgatggcctggatatggttttgtatgaattgaaaaactaaacagaataagagaaggagaaaaacaggtattaaaggactaagaattgggaggacctaggacatctaattagagagtgccccagggggtgcagcgtaattacttgcttggttggcaagtttttgggctctatccttgagttttttatgttgtcatacactaggccagattgatttaggtaaaaacaacactcttcatttaagaatatacggagtcctcctttttcagcagtgagtaagtcaaggcctcggcggttttggaggacaactgcagctaaagagtcaacttgggcctggaggactgataaagtttgtgggatgtctgtgatgctagcagagaagtcattagagaggctatggaaggtcgtgacagaggttgaaatgcctgctattccaatactgagagcaatagtggaggcagaaagtcttaaactgacaagcacgggaattagtggaataactcttttttgtcgtgtcggtgtcagaggggaacagggagctcttcggtcctatttgcaaattgaattttgggagtaaggaaaactagtgtgcatgtacctgcccaattagcaggtagacacatgtaggtagaggatccacagaggaagaagagaccttgtgcgaggcaaaactggagatgcaaactaaaaagatgagaaggagtgctgaaaaaggtgtcttgtacctagactcctagggatccagctagggcggcagccgtcagaggttgtaacgggaactgatgaggtaactgtgtagagggggaggttcgattttcatggtgtgtgagaaaacgtcgagtgtctacgaccaacctttcactgttattttcggggctgggtataagtaaacaagaagagggctttggagatgaagagtaaaggaacatcgagaaggtgaaaggttacccaggggaattccaatgggtctttgacgagagatacataaaggagcagccacaggaatagtagtttgtgttgtgaggggtccaaatatgtggggagtagagttgatataaggagaaaggtgttttaagtaagtgcggaggagggtggcagcttgctgatgtcaaatgtctggggaggtcttgctggacctgtctagaaagtaaatgagttcttcaggagggtaaaggtgagggctgttaaaggaagttcggaggtatagggagacaggagatgttgcctagtctgcatgtaaggcggggacagctgtgtaggcactggaagaaagggaaatgcaaagccagcggttgttcgctaaggagggattagaaacggctaggagagaatgagtaaagttgatagtatggtggagatagctggggagaggtagagggtggcataagaatgggaatgataataagagtgagtataaaactaaacaatagaacttcatcagggtggaagtattggagggtcccctgccagcagagatcatctatccactctaagagggagttaagagttgccagtcctgggcgggggcaaattctcgagcttgatgtgtagggaagggagggggactgaataatccctgaggagtagtagaatagcagatggaacactgagaagttatttccttgaggatagatttccacaatggaaaggaaatgagaggttctaagaggtgggctggtggcttgtactatagcatagcctgcctttggtggtgtgtggcgattaggcctggtgaaactgccatcaatagaccaaatgtgttcagggtgaggaacaggaaaggaaatatggggaaatggggtgaatgtcaggtggatcagagagatacagtcatgggggtcaggtgtggtatctggaatactgtgggaggctggattgaagtctgggccaggaacaatggtaattgtgggagactcaacaagaagtgagtacagctgaaggagccagggagcagaaagtatatgcatcaggtgggagaaagaaaatagattttggaagttatgagaactgtagagagtgaattgagcatagtttgtgatttttagggcctctaaaagtattaaagcagcggcagccgctgcatgcagacatgagggctaggctaaaacagtaaggtcaagttggacagaaaggctacagggtgtggtcccggctcttgtgtaagaattctgaccacactaaccatgcctaggaaggaaaggagttgttgttttgtagaagggattggggtttgggagattagccggacacgatcagcagggagagcacgtgtctttatgagaattatgccgagataggtaacagatgaggaagaaatttgggcttgactgaagtaatgggggctgtctgtgaagctttgcggcagtatagcccaggtaatttgctgaacctgatgggtgtcagggtcagtccaagtgaaagcgaagagaggctgggatgaagggtgcaaaggaatagtaaagaaagcatgtttgagatccagaacagaataatgggttgtggagggaggtattgaggataggagagtgtatgggtttggcaccatggggtggataggcaaaacaatttggttgataaggcgcagatcctgaactaacctgtaaaccttgtctggttttaggacaggtaaaattggggaattgtaaggagagtttataggctttaaaaggccatgctgtagcaggcgagtgataacagactttaatccttttaaagcatgccatgggatgggatattggcattgagcggggtaagagtgattaggttttaatgggatggtaaggggtgcatgatcagttgctaaggagggagtagaggtgtcctatacttgtgggttaagatggggagatacaaagggaggatgtgaaggaggctctgaactgggggaaaaggcggcattgaggtgtggctgtagcccaggaataggcagggaagcagataatttagtttaagtgtctcggcctaataagtgaactgggcgggtggggataactaaaaaggagtgcttaaaagagtactgtctaaattagcaccagagttggggagttttaagaggtttagaagcctggccgtcaatacctccaacggttatgggggcaagggaaacaggcccttgaaaagaaggtaatgtggaatgggtaggctccgtattgattaagaggsggacagacttactctccactgtgagagttacccagagcatctgtgatggtccsgtaggcttccgaggcaattgggcagtgtcagtcttcagccgctaagctgagaagatctgggaaggagtcagtcagagagccttgggccagagttccaggggctctgaaagtggctgccaggtcagttgaacagtccaattttcagtggggtcctgcacagatgggacacagcttaggaggaatcctgggctgtaggcattccttggcccagtggccagatttctggcacttgtagcaagctcctgggggaggaggttctagagtaaccccagcagctgcagttcaggcgtttggagttcttgtgtgctggagatatggctggggtttgtctcacagtggaggcaaggaattgcaactcagaaatacattgctacttggctgcctctactttattattgtacaccttgaaggcgaggttaattaagtcctgttgtggggtttgagggctggaatttaatttttgaagttttatttaatgtccggagcggattgggtaataaaatgtatattgagtgtaagacggccttttgaccttttagggtctagggctgtaaagcatcccagggttgctgccaaatgagccatgaactgggctgcgttttttatttgatgaaaaaagcctaaacactatctgatttgggataaagaaaaaggagcattaaccttgactatgcctttagctccagccacctttttaagaggaaattgctgggcaggtgggggagggctagtcgcggaacgaaactaagccggaccgggtgtgaggaggggaggtgataaaatgattatagggtggaggagtggaggctgaggaagaattgtgacctagctcggcctggtgaggaggggagaagtcagatgggtctgtagaaaagaaagattaggaagactcagcgacgcgtggggttgggactgaggggacaggcgggagggaaagaaggaagacttgggatgagttgcactgggaacagagactagggagggactgatgtgtaaaagaatgcctggacgtcaggcacctcagaccgtttgcctattttgtgacaagaattatttaggtcttgtaggatggaaaaattgaaactgccattttttggctatttggaactactgtcaagtttgtattggggtcaagcaggattgcagaagaaaaggcatttaggttttaggtcaggtgtgagttgaagaggttttaggtttttaagaacacaggctaagggagaagaagggaatggagggcgggagcttgcccatagtgaaggaggcaagcccagagaaaagagagagtagagacacagagagaaggggtggggggttcttgcgccccagaaaagtggagaaggggtagagacacggagagaagggttgggggattcttgccctctagaaaagtggtacttgctgctaagggtgaaggagaaggggctgggggtttcttgccccgcagaaaagtggagaaggggtagacatggagagaagggtcgggggattcttgcctcccagaaaagcggagaaggggtagagacacggagagaaggggttgggggtttcttgccctccagaaaagcggtacttgccgctaagggtgaaggaccaaggcaggcgtccttgcatggtcagacacctctgaaacatgggtgaataatcaggcagccatccccacgtgattaaacaccaagggaagactgtcttcccaagtcagtgaccagcaccggagttttgggtcaatggataaaacgcgtctcctttgtctctactagaaaagaaaaggaactgaaattaagagaagggagagattgaagtgtggcaccaagattgaaaggagaaagaggttgagggatagtgagagaggttggagaagagagtaaaaagaggccgcttaccagatttaaaattggtgagatgttccttgggctggttggtctgaggaccagaggtcgtaggtgaatctttctcatggaacaaaaagcaggacaggggattgatctcccaagggaggtcccctgatccaagtcacggcaccagatttcactctcgtccatatgaagagaccaccaaacaggctttgtgtgagcaataaagctctttaatcacctgggtgcaggtgggctgagtccgaaaagagagtcagcgaagggagataggggtagggccgttttataagatttgcgtaggtaaaggaaaatcaccgtcaaagaggggttgttctctggcaggcaggagtggggggtcacaaggtgctcagtaggagagcttttaagccaggatgagccaggagaaggaatttcacaagataatgtcatcagttaaggcaggaacaggccattttcactttttttgtggcggaatgtcatcagttaaggcaggaaccggccatctagatgtgtacgtgcaggtcacaggggatatgatggcttagcttgggctcagaggcctgacagttagtattgaaatgtgaggtaccattgctttcatcatgctctttgttgcctgtatactttggttttgttttttgtttttgcttttaaacttgcatttttgttttataggtcttgtttctgaaaggagtgtctccctttcccgcttgcgcaattggggcactcaccgtatttggggtgtctcccaggtcgtacaggagcagatcgctcccttcacagggtctgtgggtcctcttgggattgctggtttgttcttgtagtcaatctggagctaaaattcacaatctggagtctattttaaaattatgttgataaatttgagcccatgtgtgtttttctctgataaggttcagctgctcgtattgctagcacagaataaatggaaagttgagtttcactggaactatgatttagccagctgagctttttagaggaagaggaggatagaggaagtggaggtatataagttagtgataagggtgatgaactgtgaaatctaacctgggaaaggaagaaatgaaggtgggaggaggtggatgaacagtgaaaaagtggtagaggcaatggattagagattccagtggagctaatggagtctatgagcatcttagagaaggtgaaccaaaaagagaagatccaagagtctatacatcccaagaattaaccactctttctatgaattcttcttaaatgtagatggtgctcttctttttagctttcccctgtgaaaatggaggagaggtcgttatcacagaaattgctttcgtatctgcttatgtagcactgacctttgctaaacctcagttctacaattctagtgcctgcaagaattgcctgaatgatctaccagcattttgtactaattatatgtaaattatttttaacaattcttcattcaaattcacctgttctggactgccattctccctctgtgagactctctcctctttcctctccttgcctccaattttaatcattactaagtaagttagcttataaaatatttattggatcttctctacatttccagggcccactgaccttgttggcccatccagtgcccattcagctccctatcttgcaccttcatttccttctttttgggatatcttcccttgaatgttaaaatcctttggccacaaatttagatgccatctattctataaacactctgccaggacttcaatttattgaattgtgttaattgttgccaaaatggtatcctctttatgtttttttctccgataccaggttaattttcaaaattatattctttatagccacagcccttctcaaaaacttttaggagttttccatttctcctagaatgatgtccaaactctttagcataggctctagccttctttcacattctcattttcttcaccacctcttcttggagtctttccagggcccactgaacttgttgtccatccaatgctctttcaatcccctatcttgtacctgcatttccctcttcttggaatatcttctctgaatggtaaaaatcctttgagcacagatttgaataccacctactctataaatattttacttgctcctcactgttgaaagtaatctctccttcttccaagcttgcaaaataactctctgtatacctgttagtcataagaatacttttcaattttataagtgtagttttcaaactgcttttacatatgttttactttattctctacaacaagatgaggttttctttagcaccattttaaagatatggaaactgggaatgagaattatttaaattgcatgtacttgccactgtcacccttgcctttgaataatttatattcttatttttcttgttcccagactttgtccttcagtgcactgagtcaaagctttacactaasaggcagtcttatttgttgaatgaatgcatgaaaggctggttttatgaaagcaaaaatgtttttcataattagtatttgaaaagatgtgtttttcaagtaacttgcatgttaatagccttttttatgatgtggcctttgttmagtctggcagtaagaaaaagaaagtcaccaaagctgaacgattgaagctgctacaagaggaggaggagagacgactgaaagaggaaggtacaaaataaatagtgatactatttacctatacaggtaatagtcacgataggttggtcttttgtagtaaagtcaatattttttcaaagttctttaattttaaaatttaatctgttttataataggtatctatcttttagaaagtatccagaaagatgttagtacatgccagtctctttcagatatatattgaattagggttgccagagataaaatacaagagcccagttaaatttaactttcagataatcacatggataatttgggataatttgtcccatgcaatacttgggacatacttaacttaaaaaaaaaattgttttaaataaagttttggtgccgcaaaagaaatagcactcgaatataaaattttctttttatttctcagcaaggcaaggtacttctatagaagggtgctctctcaccaatggagcaatggtgggtgcacacttggacaagggaggggaaggggttcttatccctggcgcctgtggcccctgctactgtgtcattcccctattggctagggttagaccacacaggataaactaattccgattggctaatttaaagagaatgacggggtgagcgctttggccggattcagggcagagcaggtagcaggtaatcggaatgagttagggtggagcaggtgatcagaatgagttagtgtggagtaggtgatcagaatgagtcagggtggagtcagtaatcgaaaaaggttgctttacgaagaagttaagtttaaaagtagaaggcaaagaattgaacatactgacatattaattctttgaagagaaatttagaattcatattcaacaaatgtttattgttcatctaaaattcaaattcaactgagcatcccatgttttaatctgctaattctggtaaccctatcttgaagtgtttatatttactgatgaaattaggagcattggaattttaaaagaccatgtatatttttattcttttataaaaataaaagaataaataaaacaaaacaaaaaaagaaattaggagcattggtgctgtttgttcagtaaaaattctgaaactcaaattcattaaatgtgggaaatataaactagcaagaaatacatagagcagcctaaatttttacagttttataatatttatttgccaaatttaaaatactaattttatttgttaaaaaactrattaaacattgataaaagtgtttattaattaaagtaccaaaaagtgatttttaaaatctgagtatttagatagaggtttttaaaagactgttctcaggttccatattgactttttatgtataattttatacatccttttttttcggtgactcctgatacaaatacaatatcaggatctatatcttggggcatgttttatttatattggattaaacttatactcttcaatatgtacttcacattttgtttttaatagtgagagcaggagaagattaaggtaattgcatctgagatgtagatgtcacaagattatggaagtcttctgaaggcttgacttcctcttcattgccatgataggtctgccataccttattggttaaaatcactattggattgctataaaccttttggagaagaaaaatattattgtggcttattttttatttttttatttttgaccacaaagtttgaatcatgttactttctttctttttttttttctttttttttgggaaatgggaatttgtctcaacctttattttgacacattcagcaggagatgatggatgttttaaattactcttgataagaagctatcagtaggagttattttgtttcacagaccctggcaggtcaaaaacatactcaaatcgaataaatattctcaaattaagtaggggaataataaggccgagtagctcctgctgcagagaggaagcacatctaaagctacagtgagtgctcaagggagccactcctacatcatttccacaagaagcaaagaagagacaatggctgggagtcatgtgtctttatagtagcatgatttataatcctttgggtatatacccagtaatgggatcrctgggtcaaatggtatttctagttctagatccttgaggaatcgccacactgtcttccacattggttgaactggttttcagtctcatcaacattagtgttcctatttctccacatcctctccagcacctgttgtttcctgactttttaatgatcgccattctaactggtgtgagatggtatctcattgtggttttgatttgcatttctctgatgaccagtggtgatgaacattttttcatgtgtctgttggctgcataaatgtcttcttttgagaagtgtctgttcatatcctttgcccactttttgatggggttgtttgattttttcttgtagttactgtcttgaagaaaggagaactgacacttttctcatatctaccatgtaataaagactgtgacttctataaaagattccaccactacatcttgaaaatattaggagtaattttaagggcttaaaaatacagtgatctattcactgagaaaaaaattatttttggttctttagaggaagccmgtttgaaatatgagaaagaagaaatggaaaggcttgaaatacagcgaattgagaaagaaaaatggcatcgacttgaagcaaaagtaaataaacattaataatgttcttaatgaatacttaaactatggctatcagatttattgtcatttaatgtccttctcagcccatagctaccagtaatatttaggcctacatgaacttaatcgtaccatagaataagtgacattgttatccagatttcacagatgaggaaattgaggcatagagaaattaagcatctaatcagtggcatagcaaagacttggatcttcttttttttttttcttgagatggagtctcgctctgttgcccaggctggagtgcagtggtgtgatcttggctcactgcaagctccgcctcctgggttcacgccattctcctgcctcagccttccgagtagctgggactacaggtgcctgccaccacacccggctaattttttgtacttttagtagagatagggtttcaccttgttagccaggatggtctccatctcctgaccttgtgatccgcccccctcagcctcccaaagggctgggattacaggcgtgagccaccatgcctggctgccaagacttagatctaagcaagtcttgctgcagagcctatgcttgtaacctttaagcatacatgaatctgttgtatagacaagataacaggaacaaaaaaaaaaaaaattcaaaatattcaaattctacctctccttttttagtttcacttctctktttcactagaatcttttagatcagtaattctgaaatattctggtctcaggacaaaactccattactattaaaaactgaagaccctccaaggagcttatgtttatgtggattacatctatcaatatttaccatattagaaattaaaactaaaaaattttaaactgcttacattaacagacattacatgttgataaaaataaattttattaaacataagtaaatacatggatatttttaaagaaacaacttttttttaaaattaaggaaatgatggcattgtttatattttaaaaatttatttgatatctgacttaacagaagacagctggattctcatatctatttcagtattccatctgttgcaatatgttgttttgtatgaagcatataaggaaaatctggccttatacagatatgcaattgaaaaaaagtaatattttaatagcctttctgataattgtggatattcttctttgatactgtatcaaaacttttttttttttttttttttgagamggagtctctctctgtcgcccaggctggagtgcagtggcrcaatctctgctcactgcaagctccgcctccygggttcacgccattctcctgcctcagcctcccgagtagctgggactacaggcacccgccactgcgcctggctaatgttttttgtatttttagtagagacgggctttcaccgtggtctcaatcacctgacctcgtgatccacccgcctcggcctcccaaagtgctgggattacaggtgtgagccactgcgcccggccaagttgtagtttcttaatgtggaatatgaaaccatatcagtcaactattcatactctgttattttaaaacattgatctatcttaccctctgaacagatcttgttttcatacatgatttggcattatcatgtgttgcttgcttgaaaagttttggtttactgaattatttgcttccaaatgttgatgtaattgattattcattatcaaaaatcacatacattagtataatcaccaaccaaatcagaagattttttcattttttttttgagacagagtcttgttctgtcacccaggctagagtgcaatggcataatctcggctcactgcaacctccacgtcccaggttcaggcgattctcctgccttagcctcccgagtagcagagattacaggcacccgccaccgcgcccggctaattttcgtatttttaatagagatggggccaggctgatctcgaactctcctgaccttgtgatccatgcacctctgtctcccaaagtgctgagattacagatgtgagccaccacgccaggcccaaatcagaagtttttaaagatcggaatactttcaagcttacagtgatagatacaagttttctaaaatttgaatttttgcctgacagcttgaattttgtcattggcaacagatattttgagttgtatccttgaagtgacacactccattcattcatttttgagagaatgtctaccaaattagtcaaataattgcacaagtgatatttctcaagacagtattgtcattcgatatgcagcagaagagctttatgctgacttcccattttatccaacaggctattaaaaagacatgtacttagggttcagatttaatacaattaataattttcacctcttcatcagggcattcttttttttttttgtaacgtgatttagagtcttgccctgtcatccaggctggagtgcggttgcgcgatcttgggttagtggaacctctgcctccagggtcaagcagttctcccccttcagcctcctgagtagctgggattacaggcacacgccaccatacccggctaatttttgtatttttggtcgagatggtgtttcaccatgttggctggtctcgaactcctgacctcaagtgatccgcctgcctcagcctcccaaagtgctgggattacaggcgtgagccactgcacccatccatccgggcattcttttgtgaagctggctccttcccttcacctctccccctagaagtagtacagtttggggtcactgtctgatctgtgctaagacatcagcactttcacaccatcttgcacaatcagtgcaaatagatacacgatgaaaaagtcaaataatgttagtattattatggaaatagatttgacctcacagatcccaggttttaggtacccatcaagagtctgtagatcacactttgtaagccactgtttcagatgaaaccttttggagatatcagttatattcaaactaattttaatattcattttgaaactgcagttatatatttagccacgtcagttttagatgctacttgtgaaacataaagttaaaattaaagagctgatcaatgtatctgtccttgtgcaacaggatctagaaaggagaaatgaagaacttgaagaactttatttattagagaggtgttttcctgaagcagagaaattgaaacaggaaactaaattgctttctcaggtaggactgatttctcttttttagctaatacctttgtcaccacaagagggaggtgtagtccaattttgatgccaagaaaagaaactaaatttttctgttttaaaaaaccctctcatctgacaaattgattgcttatggcaaagtaaactaacataactttgtagaaagctatttgtcagtaataatgtccttgaaatgtttatattctttgactctgactcaattgctgggaatgtatacttagggaaattatgctaaattaaaacgtaaaagctttgtgcttaaggcaatctagtcttgctcaaaactgcataactttggaaataatataggtgaatatcaggagaaaaatgaaaaactattataatatggctaaagattgtggtataatcaagtgaaaaattctaagtacagtacaatatgattacaaatgtgaaatttgcataaactacaaaatgaatggaaggccttctactaaaatgccagtggcaactagacattagtaataacttgggaagtagaaattagcctaagtgttggcctttgcaaataagcagctctatgattagagaggaaaactaagcaaaacaaaactacttataaataatgctttaaaaataaaaatgtgaaagtattttagtgcttctatgtatctgaatattaaggattagaarttacytggataaagaagaacttggttattttagagctctctcaagttactggttaaagccatcatgtttttatctaagttggttaaactaggttataaaaattcaccttcaaaaaagaagtcatttaatctttggttgaatcttcatcaatgtgaacctttaaacatttttattccacagtggaagcactacattcaatgtgatgggagtcctgatccttcagtagcccaagaaatgaacacgtttattagtttgtggaaagagaaaacaaatgagacttttgaggaagtgattgagaagagtaaagtagtgctaaatgtaggtatttatgcattttcctataaactggctattacaaatagtctgatattaactcaaaataaaaattaatatatcatttgccaagtaataacactactgcttttgaacccttagcaaaagaagtaattggtaatcttttcattttcttttttcttttttacaagtcctaagaattccttgccatattagctaaggtcagcatatcataaaacattgattatttgtctgtctaatcaagaaamaaaaatcaagttgcatgcattcatgtagataactcgggtgggggtagtgggtaattttatcctcagttggaatatccactgttcagtaatttagtacccatgatttttcatgtttactaggtgccaggtatacactctgttagacagtgggggtacaaagacaaatcagaatattctaacttttgttcctgcaaataggatggttagactagcctgagaagctgccactttacaatgcacttaaaaatactgggggaaaaaaaactaatttattaaaaaaaatttaaattcattgctttaatcaaaaaaagtaaggtaaaaccttagaggccataaaacaatccagaaagtaagaaagtcttgaagccatggctttatagctaactagttagtggcttagctaggtaactgctatggcttagcattggttcaaagggccatcaggaggcaaagcctagagtacatacaaggtggtaagttgaaccagagactcctgtatgcctgggagcctcaaaagacattatggataacaggaaaaatttattgtgcaaaaggagataagatgcgtttggcttatctttagcttagtgaataagaaacaaaaatgtctccactaagaatttttatttatttatttatttaattaattttttgagacggcatctcgctctgtcacccaggctggagtgcagtggcgtgatctcggcttaccgcaacctctacctcctggattcaaccaattctcatgcctcagcctcccaatagctggaattacagtcatgtgccaccacacctggctaatttttgtatttttagtagaaatgaggtttcaccatgttggccaggatggtctcaaactgctgacctcaaatgatccagcagcctcagcttcccaaagtgctaggattaccactgcacctagccaagaatttttaatgaggagtgaatcaaaagttggattggaaaatttaccagaagacagcacagagacaaagagatagaaaatatgaaagagcagttgacaggcatgtatgatagagtaacaagggctaaaaaagaaaagaagggatacagaagaatggaagagagacaatattcaaagagataatggctgaaaattttccagaattgatgaaagatgtgaatcctcacattcaggaagctcaagaaattctaagtaaaacgaaaaaccagcgtttatacttttaacacttctgacaccaaatgtatgtggggttttctcacaccaaccaattatccaactctccggattcctactgaagtgtccttcgatccagtgctggtactgagtacttagagctagtgcagacccccgtcccacaaaactgccctttccttcacttccaatcacaagtcccaggttgtcacctgtacttctgatcagcctgttataaatcagccacaagccattggtcaggttatttgctgtaatggctcacaaaactcagagaaacatttactcgcctttactggtttattataaaggatattacaaaagatacaagtgaaaaactagatgaagaaatacaaggggtgaggtccgtagggaggagtgtagagcttccgtgccctcttggggcacaccacccttccagcacctcaatgtgttcaccaaccggaaagttctctgaacctcattgtttgagttttttatggaaacctcatttatgtaggcatgcttgattaaatcatttgccgttggcatttaagttcatcttcatcccctctccccatcctggaggctagggagtggggctgcaagtttcagccctctaatcacatggttggtccctctggcaatcagccgccatcctctgagactcatcatattagcataaactcaggtgaggttgaaaagggcttattataaataacaaaagctgtttctgtcattcctatccctcaagaaattctaagaagcttgtgccaggaacagggggcagagaccaaatatttatttctttttatgtcacgtcaagttaggataaatacattcacacttaaacacacttatgtgataatagaaactagaaggaattcactactcttattcctattattatcctttaatgcttttttggtccacttcctcacagttttatgcttcctgtcattgctgctatagtttaacttcttcatgttgtcataagagggtagaactgtagactcttttaagctcataccatgcattgcgagatttaatctaaacaacaagattataagagtcatttaacaaataaacatagattgtgatttgcttgcagtccactgtgagacctyagatggaccttactctgactttccgtaggcccaaggagtctcccgtgcagtctgagctatttaaatgcctgtggattaatcatacagtgttcttgctactacacatcctgtctaccagagaggctgccatggcatgacgtcagcttaggaatctggtactttgcagttagcagggaggcagtgggaagtagtactagagttcaccagtgatgagctgcaagggacatcttcctgttacaagaatgaggagtcagaagtagaagtaatagcaaaaacgatgagaaaaggataagttcaataacacaggagacagaagakgggagtaatcacarcaataggaaaggaagaaagcagaaagctgcagaaaagtggagttggatagcagtaacagaaggaaatggccctgtagtaaacaccaatttccaaattttcaaatttatttaataaactcttatatagtgcttaatctatgccaagctttggaaatattggctttctgagttctcataataacactaggagataggtactaaaaacccmatttttccaatgaggaaattgaggcaataacttgcccaagacccyactgctagttgagaggtggccaggattgaagccctgcattcttgtttgagtccatactaccctacgctacgatgctgcctgtcttaattcagaaaatttctatgtattatctgtgttagtgttcaaaatttaattctgccacttactagttgttccttcatcacactgtgcctcagtttcattatctgtaaaatatgcacagtaacaatatctacctcatagagttataatgaagaatgaatgcattaaaacatatacagcatttagaacagttcctggtgcattgtaagcattcagtaaaaatattagtagttctcttccatctccttctcctgattgttgttatattttgttgttttttctattatctctcagtcttaggtaatgacaagttgccactcgtttattaacttgctaatgaaagctgtcacacatagttaactggtagatccgagggtttaattagattcagagccaccattttcagcaagaaggcatcataggttatgttgtgttcttcatactgcatcctatcagaagccatatgatgttccattattaatttttttttttttttttttttgagacagagtctcgctgtctcccaggctggagtgcagtggtgcaatctcggctcactgcaagctccgcctcccgggttcacaccatcctcctgactcagcctcccgagttgctgggcctacaggcgcccgccaccacacctggctaattttttgtatttttagtagagatggggtttcactgtgttagccaggatagtctcgatctcctgacctcgtgatctgcccgccttggcctcccaaagtgctgggattgcaggcatgagccactgcgcccggcctccattattaatttaatgatgcgaatttgatcacatggttaaggtgtttgccatcaaatctccacattgcaaagtacattttccccaatcagaggtcaaatactttggcactgggacaattatgtgttcctcaacagcttttcacctaatcatttaggtagccattgaggatctttatctgaagcagttattacactggggattgaaaaatggtgatttgctaagtgatcattgcatctacattagacagatggcactcttctgtaaagaactggtctttcttcaccccaccttcccccttcatttctgaacgtctaacactatagactcatggatttttatttattcagtgtgttataattaattttaagggagtttgggaggaaatttttgtttatgatcttaaattacagaataaatacaggaaaggtttctatatgttttgctaaggatgtgttcctcaattcaaaagggataaaacattccctttttcacttgtccttgactatttctctgagaattaatgcaaatattcttttactttacagttaattgagaaattgaaatttattttactggaaactccaccatgtgatttgcaagataaaaatataatacagtaccaagaatcaatactacaactgcaggagctccttcatcttaaattcggtgtagccacagaaatacttctcaaagtaagtgtgatattttgcttatatattaagttttataagagctaacattttatgttataaaataatccagtattttttaagttgaaaaatgaagagattatggaaaagttagcagaataatttagagtacatatatttatccagatttaataactgataatattttatttttaaacataatttattttgttttgttttgttttttagagatagtaaagatgggatctgcctgtgttacccaggctggtctcaaacttctggacacaaacagtctttcttccttggcctcccaaagtactgggattacatgtgtgagccactgctccccgccaaatattttatttttaaagaaatagaatactatttctatttgctattaaaagtaatggcaaaaaccgcaattacttttgcaccaaccttattattcttaggataataatatgtaaggataggataggagacctcatcctaatatatatattagccaagcatggtttgcctgttgtcccagctacttgggagcttgaggtgggagcatcgcttgagtccaggatgtcagtgctgcagtgaaccactgcacttcaacctgggcaacagaggcagactctgtctcaaaaaaataaaagtaaaaatagaagaaaaaggagaagaagaagaaactataatgttatatttgaaatggaaatatcagcatgaaccagatttctttttattctataaataggatgtgggatttcagttctggggcaggaaaagtgaaagatgaggctggattatcttactgtgctagaaggcaagcaaacactcagagactaatgacattgtatgaaagggatgccgttagctaagaggctagcttagaagtcccactgatcaaatttggaataatttgaatatcagaataatgattataatcaattataacaaattgaataaataaaaatttatgagtttatagtgatacttcagaaacaaagggggaaggtggagtgaagaaagaacagttctttacagtagaatgccatctatctaatgtggatgcagtgatcagttaggaaatcaccatttttcaatccccagtgtaataactgtttcaaataaggatcctcaatggctacctaaatgattaggtgaaaagctgttgaggaatacrtaattcttctagtgccaaagtatttgacctcagattggggaaaatgtactttgcagtggggagatttggtggtcagcaccttaagcaagcgatcaagttcatatcattaatagtggaacatcatatgtcttcgatagaatgcagtatgaagaatacagcataacctatgatgcctccttgctgaagatggtggatctgaatccagttaaacccctagaccttccagtgtacaaaaataaagaggatagaggagccagttaaacaatgccatgaggaaacaataatagaaatccacaatatgggacagttctacaagacaattgtcctgaacacttcaaaaagttagtttcagaaaataaaaagtgtgcaggaataatcacacttaaaaaaattaataataaatataatcttcaacattttaaagtttttacattctagcaaccacatatttacttattcaaaccctttatgacagctgattccttgagcaataggcatcaaactgtgttagtttttattttaaaattcttaacatacttgaattttatggttaatattggatattaaatattagactagtgaaaacatgacttatctggattttataagctagatattttgctttctaaacttggtgtgttcggagataggttaacttttgcagtagaatagtctacagtataataagatacagataaagcagcatgtgtatagttaaaatgaaaagtcatgattctgatgttatgactgagaaaggtaacatattaatccacaggtgctacccagaaatgtagaagcaactttatttttcacttttctgagacccagtcttgctctgtcaccccggctagagtgcatggtgcaatcatggctcactgcagcctcaacctcccagactcaagcaatacttccacctaggatcctcccagctgccaggtagctgggactacagttgcacaccaccacacccagctaattttttgtagagatggggggggggggtctcattatgttgcccaggcttttcttgaactcctggactcaaatgatccttacgacttggcctaccaaagtgctcagattacaggtatgagccacctcacccaacctaagagcaactttaattcttagacaccttaggagaaactgaatggaaaaaggagatgcatatttaagtaagtaaatrtgtttgcatttttagagaatttttttaaacaattctttgtcatgttgattgaaccttatttttacccaagttactctcttaggtgattaataaagggaatccaacacataagtgataaagtaacttatctaatttgtataatttatgaggcctgtggccctttataatgttttctttttctcttacagcaagctagtactttggcagatctggacagtggaaatatggaaaaagtcattaaagatgaaaatgttactctgtatgtgtgggcaaacctcaagaagaatccaaggtacccttgtgggyaatactttccctgtaggtggaaagaaagacattgagccacatcatgattgccagatagatgcctattgcatagcagcatggtgtgtttggaaaagcccatttcaggaagttagcccactaagggttgaatcagaaacccgccattttcttacacaagttactttgttgagcttcagtatatcatcagtaaaatgatgattgtgtcacttaataggattggattgaagattaaacattagtgcatgtgttatagcatagttatagcatagtgtttattacaaatatacactcattaaataccaggtcttcctcttctctttacccacttaactcctctgccctccaaaaaagtagaagtggtaggtgctttctttttcttttttttttttttttgagacacagtcttgctctgtcgtccaggctggagtgcagtggtgtgatctcggctcactacagcctttgcctcctaggttcaagcgattctttgtgcctcagcctcctgagtagctgggattacaggtgcacgccaccacacctggctaatttttttgtatttttagtagagacggggtttcaccatgttggtcaggttagtttcaaactcctgacctcaagtgatcagcctgcctcggccttccaaagtgctgggattacaggcgtgagccactgcgcccagctaataggtactttctatatggcaatctggatttttttttttaatgtatctttgtgacttaaaaataataggttttcttttctttttttttttgagacagagtttggctcttgttgcccaggctggagtgcaagggcgcaatctcggctcactgcaacctctgcctcctgtgttcaarcgattctcctgcctcagcctcctgagtagctgggattacaggcatgtgccaccatgcttggctaattttgtatttttagtagagacgtggtttctccatgttagtcaggctggtctcaaactcccgacctcaggtgatccgcacatctcggcctcccaaagtgctgggattacaggcgtgagccactgcgcccggcaaacataataggttttcatatgtgtatttcttggacattttagtgctatttccccaatagttttcaacaaagaaacatctttctgaggaatgacagtgacgatggcaaattcatgagtgcttggttgctgcttgatctttaaacattttaagttacttgcattagtatagcagtgagttttagagaaaaattaccagaataaaaattaggaggcctaggttctggtcctacctctgaaaagactagctatgtgacatttaaaaaaaactagactttatttttgatagttagtaaaagggaagaaaaaaatatttcctaagttccttccatttgctatgaaaaacaaaaaaaccaactttttggtttacatctaatcagagacaatatagtaacctttctcattgtaaaatatgtcaagtacagaaaagttaaggaaataactctttatagttttaaaagaataaaaataaaatgaatagctctgtactgactacccaggtttaagaagagaattaggtggtgtcttttacgagataaggaatagtgcaggcagaacaagtttcactttgatggtgattggggtgggggttgtaaggatgatgagttctgtgctcaactggctgagtttgaagtacttacaagatatcaaagtgcaactggctgaaggcactgagagaaatctgaggtgtagtatattttgaggagtcatcaacatatagaccaatggttcttcactttttgggagtcatagattcttccgaatgtcaagtaattacagatgcttgcacttgtggaagggcatttttagacckcttaaagtccattcagagatgcatcatactcctacccaaacctaggaaaaataaagctcatrttacaaacctctgatagtatagatagtaattcaggccacagaagtaaaaatatccagagagtgtatgttgagggagaggagaaaaagggcttagcatggagcactgagtaatatcaacattgaagggatggttaggaagaaggccatatagaggagacagaaggaacttccagagatggagaagactgtggggttatggatcccaataaactgttttgagaaggatagcatcagcaactgggtccaaatgctgcaaagaaagcacatatgatcagagtcaaaattggarcaaaattaaagtgaagagaaatactgcttaggtataaatttgacacagatctagagtttcctagggtctcatctktttttgttgtaattaattattaacaggcacagaagtgttagattctctgaaacacaaattggatttgagattccaaggatattagcaacaagtgacattgctgtacgactcctgcatacccactatgatcatgtttctgcactgcaccctgtttcaacaccatcaaaagaatacacttctgcagtaactgagcttgtcaaagatgatgttaagaatgtagaaaaagcaatcagcaaggaggtcgaagaagagtccaaacaacaagaaagagggtctcacttaattcaggaggaagaaataaaagttgaggaggaacaaggtgatattgaagtgaaaatggtaggacacatttaaatatacacatttttttattcatgcagcatgcgttattagattcccttaaagtgttctcaagatttttcctaaacaactggaaattgtctgggagccactttcttgccagtgcctcaatttttaatatgtatctttttcttgccttccattaatagtcaattaatagttgagccactagcttcaacatcctaaagttcagcacaggaattgcttatttttatattaggtgcacaacygggcagctttgatgccatttaatttttgtatatttattatatatttcaaattcaagggaacttgccattaaatggaaacttacagtaaataatcttatattaccctgttacttcctcagtttttggttttgtaagaaataattttataaagtaaaaattaattttcttaaaatattacactcttctctgaaaatytgacatctttagagatagcttttgaccaatttaataatcatattcctttagttagcttcttctcttttttctgttggcaagattgtcaagctacttatttatgttagaaaaaatgtctcttaagaatttagtaatactttctcagagctaagcagattctttgtttaatagcctatttgcatgttatgagggaccaaaatatctcaagttttctgacaagtgcttaagacatgaaatgtattggtttattgatttattttctttaaacacaggaaaggattaaggattagattgaatacaaatttaaaatcagaataggaattattagatactctaagaacacgtgatttattaagaattcaatttaaaatattacactggtatcaaaaattataggccgggcgtggtggctcacgcctgtaatcccagcactttgaggtcaggagttcgagaccagcctggccaacatggtgaaaccctgtctctgctaaaaatacagaaaattagccgggcgtggtggtgtatacctgtaatcccagctacttgggaggctgagacaagataattgcttcaacccaggaggcggatgttgcagtgagccgagatcatgccattgcacttcagcctgggtgacagagtgagactttgtctcaaaaaaaaaaaaaaaaattatgaagactctgtagcaatgtagaaaaatggatatgacataatgctaagtataaaaaaattgtatttagactctaatgacaagcacgtgaaaattttaaaggcataaggaaatgagaacccagaaatctgtgcatagctcatattttagagaggagggaaatgatttattcctctttaaaaatttgtcatttttgtttaaatgttttttgggcaataagatagtttttaaaataaaaatttcatgtgaactctcagatagtttagaagctttactagagacaatagtatttccagttctcttccctttcctggaatatggaaggattatactcctttccatgttgcagctaggcatgaccatgtgacttagctaataagatgtgattagacatgacaaactcatttccaagggggaaaaaaatagaatgggtaaataggtcttggacttaacattgtttcaatatggagtaaaatacaaaattaaaccccattaacctaaaataaagttagggaggatttgtgattttatattcctgaaaacaaagaacctatcagtattttacataagaatttcacattattgattttaaaattgtgaaataataatttggaaccataaaatttgaactattacttgcatttacatggctaaagcatttttttcttatgcatctatctcaaagtggcctcatgtagtaattcattatagttctgttaattttggcagtagttttgttttttttttatttcaaaaggtttttggggaacaggtggcatttggttacatggataagttctttagtggtgatttctaagattttggtgcacccattacccgagcagtggacactacccattgtgtagtcttttatccctcatccccctcccacccttcccttgagtccccaaagtccattgtatcattcttatgcatttgcatcctcatagcttagctcccacttataagtgagaatatgtgatgtttggttttctattcctgggttacttcacttacaataatggtctccagttccatccaggttgctgcaaatgccattatttcattctcttttatggctgagtggtattccatggtacacatatacctcattttctttatccacttgttgattgctgggcatttgggctggttccatgtttttgcaattgcaaattgtcctgctataaacatgcatgtgcaagtgtccttttcatatgacttattttcctctgggcagatacccagtactgggattgctggatcaaatggtagatctacctttagttttttcaggaatgtgttagtttacattcccaccatcagtgtaaaagtgttctcttttcaccccatccactcaaacatctattattttttgatttttaaattatggcctttttttttctttttttgagacagagtctcactctgtcactcaggctggagagcagtggcatgatctcagctcactgcaacctccacctcccaggttcaagcaattctcttgcctgagactcctgagtagctgggattgccggcacgtgccaccacgcctggctaattttttgtatttttagtagatacagggtttcaccatgttagccaggatggtctcaatctcctgacctcatggtccacctgccttggcctcccaaagtgctgggataacaggcatgagccactgcaccgtgccaattatggccatttttgcaggagtgaggtagtatcacattgtggttttgatttggatgtccttaataattagtaatgttgagcattttttcttatgtttcttggcgatttgtatatcttcttttgagaattgtctattcaggtccttagcccactttttgatgggattattattttcttgctgatttgtttgagttccttatagattgtggatattctgcatctaataatctttgttaggtgcatagtttgtgaagattttctcccactctgtgggttgtctgtttactctgctgattatttcttttgctatgcagaagctttttagtttaggtatcatctatttatcattgttgttgttgcatttgcttttgggctctttttcatgaagtctttgcctaagccaatgtctagaagggttgttccaatgttattttctataatttttatggtttcaggtcttagatttaagtctttgattcattttgagttgatttttgtataaggtgagagatgaggattcagtttcattcttctatacatggcttgcccattattccagcaccatttgttgaatcgggtgtcctttcccccactttatgtttttgtttgctttgtcaaagatcagttgactgtaagtatttgcctttatttccaggttctctattctgttccattggtctatatgcctatttttataccagtaccatgctgttttggtgactatagcttaatagtatagtttgaagtcaggtaatgcaatgcctccagatttgttctttttgcttagcttggtttggctatgtgggctcttttttggtttcatatgaattttaggattttttttttctagttccatgaagaatgatgatggtattttgatgggaattgcattgaatttgtagattgcttttggcagtatggtcattttcacaatatgattctacccatccatgagcatgggatgtatttccatttgtttgtgacatctgtgatttctttcagcagtgttttgcagttttccttgtagaggtctttcagctccttggttaggtgtattcctaagtattttatttatttatttatttatttatttttgcaactactgtaaaaggggctgagttcttgatttgattctcagcttggtcactgttggtatatagcagtgctactgatttgtgtacattgattttgtatgctgaaactttactgaattcatttatcatatctaggagcttttaggatgagtctttagggttttctaggtgtacagtcatatcatcagcaaacaatgagagtttgacttcttctttactgatttggatgcccttcgtttttttatcttgtctgattgctctggctaggacttccagtactatgttgaatagaagttgtgaaagggggcatccttgtcttgttccagttctcaggggtaatgctttcaatgtttccctattcagtataatgttggctgtgagtttgtcatagatggcttttattaacttaaggcatttcccttctatgccgattttgctgagagttgtaatcataaagagatgctggattttgtcagatgctttgtttttaattctrtgtggtatatcacatttattgacttccacatgttaaaccattcctgcatccatggtatgaaacccacttgatcatggtgaattatcttttttaaaaaatgtatttattattatatactttaagttctgggatacctgtgcagaacgtgcaggtttgttgcataggtatacaygtgccatggtggtttgctgyacccatcaacctgtcatctacattaggtatttctcctaatgctatccttcccctatcaccccatcccccgacaggccmyagtgtgtgatgttcccctccctgtgtccatggcttctcattgttcaactcacacttatgagtgagaacatgcagtgtttggttttctgttcttgtgttagtttgctgagaatgatggtttccagcttcatccatgtcccctgcaaaggataggaactcatccttttttatggctgcatgaattatctttttgatatgctgttggattcggttagctaatattttgttgaggatttttacatctatgttcatcagggatattggtctgtagtttcctttcttgttataccctttcctggttttggtattagggtgatactggctccgtggaacgatttaggaaggattccctctttctctaccttttggaatagtgtcaataggattggtatcaatttttctttgaatgcctgatagaattcagctgtgaatccatctggttctggactttttttttattggtaatttttttttaattaccatttcagtcttgctgcttgccattgatctgttcagagcttctatttatttctgttttaatctgggagagktgtatatttccaggaatctattcatctccttyaagttttctggtttgtgtgcataaaggtgttcatagtagccttgaatgatcttttgtatttctgtgctatcagttgtagtatctctcattttgtttctaattgagtttatttgaatcttctctcttcttttcttggttaatctcgctaatggtctgtcaattttgtttgtcttttcaaaaaaccagatttttatttcatttatcttttgtattttttttttttgtttcaatttcatttagttctgctctgatcttagctatttcttttcttctgctttctttgggtttggtttgttctttctctagttccttgaggtgtgtcttcagattttctatttgtgctctttcagagtttttgatttaggtatttaataccatgaattttcctcttagcatcacttttgctgtatcccagaggttttgataggttttgtcactattattgttcagttcaaagaatttttaaatttccatcttgattttattgttgacccaatgattgtttaggagcagattatttaattttcatttatttgcatggttttgagggttccttttaaagttgatttccaattttattccctgtggtctgagagaatactgaatataattttgattttcttaaatttatttattcatttgagacygagtcttactctgttgccaggctggagtgtagtggtgtgatctcagctcactgcagcctctgcctcctgggttccagtgattctcctgcttcagcctcctggatagctggaattacgggcaaatgccaccatrcccagctattttttgtatttttagtagagacagagtttcaccatttggcccggctggtctccacctcctgatctaaggtgatccacccgtcttggcctccaaaactgctgggattacaggtatgagccactgtgcctggcccaattttcttaaatttattgagacttgttttgtgtcctctcatatggtatatcttggataatgttccttgagctgatgaataatagaatgtatattctgcagtggttgagtagagtgttgtgtaaatatctgttaagtccatttgttctagggtatagttttgttttgtttttttttttccattttctgtcttgatgacctgtctagtgctgtcagtgttgaagtattggagtcccacactattattgtgttgccatctatctcatttcttaggtctagtagtaattgttttataaatttgggaactccagtgttaagtgcatatatatttaggaatgtaatattttcctgttggactagaccttttatcattatgtagtgtccctctttgtctttttaaactactgttgtttatagtctgttttatctgatgtaagaatagctactcctgcttgcttttggtgtccatttgcatggaatgtctttttccacctctttactttaagtttatgtgactctatgtgttagatgagtctcttggagacaacaggttcttggttggtgaattcttatccattctgtggttctgtatcttttaagtggagcatttaggccatttacatccaatgttagtattgagatgtgaggtactattctattcattgtgctagttgttgcctaaatatattatttttttgttttgtttttatgttgtgttattgttttataggccctgtgagatttatgatttaggggggttctgttttggtatattttgaggttttgtttcaagatttataactccttttagcaattcttgtagtgctgacttagtggtaaattctcttagcatttgtttgtctgaaaaagactttatctttccttcatttatgaagcttagttttgctggatacaaaattcttggctgataattattttgtttaaggaggctaaagataggaccccaatcccttctagcatgtaaggtttctgctgagaaatctgcttttaatcttttgcctcacatttcttaagactttttcctttgtcttgaatttagataacctgatgactgtgtgcctaggtgattatctttttacgataaatttcccaggcattatttgagcttcttgtgtttggatatctagatttctggcaaaaaccagggaagttttccttgattattctttcaaatatattttctgagcttttagatttctcttcttccttgggaacaccagttattctttgatttggttgtttacataatcccagacttcttggaggctttgttcattttttaaaattcttttttctttttctttgttgggttgggttaattcaaaagccttgtcttcaagctttgaagttctttcttctatttgtttaggtccattgttgaaaacttcccagtgtattttgcatttctctaagtgtgtctttcttttccagaagttgtgattgttttttatttatgctatctatttctctggagatttttttatccatcgcctgtatcatttttacaatttctttaagttggttttcacctttctctgatgactccttgagtagcctaataatcggccttctgaattctttttgtggcaattcagagatttttttcatggtttggatctactgctgatgagctagtgtgatcttttgggggtgttaaagaaccttgtcttttcatattaccagaattgtttttctggttcctactcacttgggtaaactatatgagaggaaagatctggggctcaagggctgcttttcagattcatttgtcccacagggtgatcccttgatgggctctcccccttcccctacagatgaggcttcctgagagccagaatgcagttattattattacttttctgggtctatccacccagtggagctactgcgctccaggttggtactgcggagtgtctgcaaagagtcgtgtgatgtaattcatcttcagggctctcaactgtggataccagaacctgctctagtggaggtagcaggggaatgaagtggactctgtgagggttcttggttgtagttttgtttagggcactggttttctcaaatgctggctgtttgttggccttcagccaggaggtggcgctttcaagagggcatcagctgcggtagtgtgggaggatacaagcttgccctaaggtaacctggataattattcaggtttctcaggtgatggatggggccatagagctcccaagagattatgtgttttgcctttggctatcagggtaggtaaagaaagaacatcaggtggaggcaggtataggcatgtctgggctctgactctccttgggcgggggttgctgtggctgctctgggggatgggggtatgcttctcaggccagtggaattatgctcccagggggattatggctgcctctgctgtgtcatacaggccgccagagaggtgggggaaagtcagcagtgatgggcctcacccagctcctacacatccatcaaggcaagtctcactcccaccatgcatcaccaacagcactgagtttatatccaggcaaccagtgagtagggctgagatcttgccccaggctaccagcctccctgctaagaaagtaaacagggcttttgctgccctgccctccccgctgccctctgtggcttctgtgcttgtgtctgtacttcccatttcccaccgccccccatcccctgttcccggatcctgcccaggaaaatttgtgtttggtggaaattattgcaaagttcagctagaagtttccttctccctgtggtccttccccaattccactggcagctctccccaaggacccctgtgagataaaagtcagaaatggcttccctggagaccaggagcgcctacagggctcttcccactgcttcttctacttttatatttcattcggctttctaaatccatttcagttctaggtaaggttaaatccttctcccatgatctggattttcaggttctccagtgaggatgtgtgtttggaggcagattatcccccctcacactttggacactcacagtattttggctgtctcatggagtttgcagtggcaagtgcttctttcagagtctgtgaattatttccgttttcytggtgtgttcctgcagtagttcttggagcaaaagttcatkatgtgagtctccatacactcactgttctgtctgtccaagtgggagcttcaagttagtcctgcctcatatctgccatttttcctaaatggcaatacttttatactaaatatataagcatatgaatccactacaatactgactgcatagtgaatttatatcttcttctcaatatttgtcatcaattagtgtagacagctagtgggcctgaaagtaccgagctaagcttttcttagtttgaatggcccttaccaatgagtttaactacatccagtttttgttattatgtaatgttacattgaaccattttaggttataatgatgaataaagatatgcaaatgatgatgttgaaagtgccacaaaagtacaccaaggaggccaggtgcagtggctcatgactataatcccagcactttgggaggctgaggcaggtgggtcacctgaggtcaggagtttgagatcagccgggccaacatggtgaaaccctgtctctattaaaaatacaaaaattagctgggcatggtggcatgtgcctgtaatcccaactgctygggaggctgaggcacgagaatcacttgaacctgggaggcagaggttgcaatgagccgagattgtgccgctgcactctagcctgggcgacagagtgagactctgtctcaaaaaaaaaaaaaaaaaaaaaaagtacrccaaggaaaaccattataatgaatggcaagatgcacattttatcaaatttgaggctatgttcaaatacatagtctaggctgggtgcagtggctcaaggcctaaacaagaggatcccttgggctcaggagttcaagaccagcctgagcaacatatcaagacctcgtctgtactaaaaatcaaaaaaagtagccggatgtggtggcatgtgcctatagttcaagttactaggaaccctgaggtgagaggattgcctgagcccaggaggtcgaggctgcagtgagcagtggtcatgccactgcactcaagcctaggcaagagagcgggaccctgtcttaaaaacaaaaataaaaacaaaacaaatacatagtccaagaaacctcaaataaagatcagcaggcaattagtgatatggcagaaataattttactttataaaaggcaatgaaaacttgtccaaagtctgtgaatggtaagaattgtgtgaatggtagatacaggaacctggctggaggatttatatccatgggatttagaaagggacaggtgattgcctagaaagtgagagtaacattaactcagcaccctcatttccaggaacatatctcaccaccacccaacagacacatgtgtagacgcttatgcttatgtatctgtgctctatccttctgctgaaaaccccacaacattctgaaaatgctaatatgaataatgctgaagtatgtatgatttccacagaagccgaagaaccccatagtattggtgaggtgtgccagggcaggagggggaagccatcttctgtgctgaagggggaagggtggtgggtgactgcttagagcgaagaatcccccaacacaaaactacttgtcagatgggcctatacttgccacagattctgaacagtgtaaaccgcctttygtaggtgtgagtagactgcagggagcaaaaatcactagatttataaagacaatcagcagctcaaaagaggaagacagagataatttgatgggatttgttaggggaaaagaatgagagatgatggatagaaataggagtgtaatatctatataaaagaaactcgaagtcgagaatggacaggatgagtttgatataacaattggtgctggggcagttgactaagatttaaaagaaatttcgattctcactttaccctaaagactaaaaaaaaaaaaaaatcacagttttaaatataaaaacaaactgaactattcgaaaattataaaaataatgaaagtatttgaacagaatataggaaacttattttattatctttactaagaagacctttcgtacttaccagtgcatyaaaaccaaaagcatgaacgaaaaagagattggattcaaatatttgtgtagccccataaacctcattataaaacaaagctgaaaggcaaataacagactaagaaaaatatttcaacgtacatgacaaggggttataccccaatataaagaatttgtacacatcagtgagaagacaatttcttaatataaaattaagcaaaggacatgagcaggcagctgagaaaagaaatacaactagccaaaaatgtactgaaccaaataagtaatcaaattagaaaaaagatgtcatttgttttcctatcagattgagcaggcaggcgtcttcacataccgttattagaagtgtaaatctgtacagtccttatttggtaccatgtaaacatgcctatgattagtgatttmacttatagtaatttattattagaaaataatagaacaaaataaataaaaatgattgtgccaagattttcattgaagttttttatagtagcaaaaacagtccacaaattaaaataattgtaaagtatccaaacaacactagtttgtttggatatttggatattttatcatttaaaatgacacagatttatatacttttctatagaaagatccctaagctgtattgttaaattttttttaaagttaaaactctattatcaatatgattctgtttttatgaatgcacagaaaaaatctagaggcctctttaccaaagagtggctatcttttggtggtgggggaaagaacgtgagaaggatgggatggtggtatattatcagtgatttttttactgtctatactctattgtgttatttgaattttcaataagtaagtactgaacacgcaatactttcctcataggaaatgaaacgatgtatttcccattttggctttaaagggggaacgttcatgataagcctctgtgctgaggtgaaattcccttcctcccatcacacgaataatccctgtacctaacttctacttgtcttcattcaagacttaccttaaattttacctccagagaatcctccgtctcctcagattaaatcagatgtccctccactatgctcttgtcattctgtttaattattataattgttgccttaaacactaaattatgatcttsagggcaagaatttcttgagagacttcatatttaagcagagagcatagagctcatgataagggctcaatgaatgtttattgaatgaaggaaggaagaagtgaatgaatggatgtttaaatgatgaaaagcaggccctgacttgggtctgatttgttgtgagcagcctacataaattgggcaatccaaccactatsctcctcaaagttatcctgtcttttgagagatacttaagatcctcttcattacagttgggtgtgctggagatcacttctgctacctttacggattctgcaagctggttactggggattcttgggactctctcctctgcagttctgatcctccacccctttagtgatcmggcatagtatgtggtaataggaagactcttgctgtcactacttcagccttaggaaaggtgtgctcctcccattccagttggaactcagtgtgtgtgtgaagcaatatttacagacagtgtaaagttatgtttgtattcctatataatcacagctacaggagaactaacataaccctaaatttcattcataacacaatttgtgtgtgtgacaaaatgtattctaaatgttttaaactgctatataaattcatgatactcaacttttttgtctatgtgtataaattagggactacatgtaagatcagtaggcaaacttaactatgttttggatttagagaaaaaagttctctatttttccagctttttttttttttggttgggggtaaactgcttacctcacaattttaggttggcatattttattataaatcttacatcattatatctttataatgactttagagactgatgcaaggcaagtatgatataataatgcaggcaattatggcccagaacatatgagttatgtttgatatgttaggtaatcacaaataacaagtatttagtattttggtcatttaaaaaattaaatctcttacattagatgatgtacacattttctttttcatgagtacagcaagaagtttgccactagagggctcttaataccacattttagttcatttaaatgtgtaatactaataatattataggtattgggtaatactgtcttcccaattactatatcatgcaaactttttagaaaagcctaatttaagtgtagcacatttgtgagaaattttttttctaatgagaattaccttcagaactacattagtgatctaaggggcatgcattatagtatgtrggtctttgaacttttaaaagttaaagtagtctctggctttaagatagtttaagcaaacatatacaggatttaacataaatattttattttattttattttattttgagagggagtctygctctttcgcccaggccggagtgcagtggcgctatctcggctcactgcaagctctgcctcccaggtttatgccattcttctgcctcagcctcccaagtagctgggactacaggcacccgcccccgcgcccggctaattttttgtatttttagtacagacggggtttcaccgtgttagtcaggatggtctcgatctcctgaccttgtgctctgcctgccttggcctcccaaagtgctgggattacaggcgtgagccaccgcgcccggcccatataaatattttatatatgtaatgtatatgttattggcaaacatttaccaaatacctgctattgataagggattcaacacgctcttgtttttaatgagctaacaatcttgtggattagaagagtaacagttaccatatcttctaatatatgcaatgagagagattctacatgggggttaagagatcaaaataggctgggcgtggtgtctcatgcctataatcccagcactttgggaggccgaggcagggggatcacctgagatcgggagtttgagaccagcctgaccaacatggagaaaccccatctctactaaaaatrcaaaattagccaggtatggtggcaggtacctgtaatcccagccactcaagaggctgaggcaggagaatcacttgaacctgggaggcagaggttgcggtgagctgagatcatgccattacactccagcctgggcagtaagagtgaaactccatgtcaaaaaaawaaaataaaaataaaataaaaataaacccaaaataaaaacaaatgaacagattggaagtcttctctcatgaggtaacatgagctgaatcttttggtgtagcatggagaagtttagataggaaggaaaggaagttattctggtcagagggaaaagtatggagacatgaaatagccttagtaatttgggatgttttgtgatcatygtggataaattaaaaatccatgggaataagttatataaaaaacctagcatcagagctccttaacattcaacaacctttaaygtgccacaaatgtatgttttcagtgcatttccaggtcataccctgggagttgttctcatttccttactcacttactgaatatttatcatacgcctacctctatgtggtaggcaccattctggccctcgggaggatggctaaagaacaaataaggctccttctctcataatttacatacaagttaggagaaatcaacaataaataagaaaaagtagaaaataccatatagtaatcattcatgcaccaaattaaacaggattaaactgggagtgactttacattgggtagttagggagggcctgtttgatggggtattatttagccgagacccagatgacaagaaggaatcagctatttaaaatgaaggtaaaaatagtcttcaggcacaattattgcagaagtcataaaacagaagtgagaaggaaggccagcgactgatgtatgatgggcaagaagcaaagtggtatgtaataaagttggaaagggaggcagaagccagataaagtcaggctttgcaggccagagtgagaatttaggcttttattgtaaatgtagtggggagccattagagggtggtaagtaggagtgtgacatgatgtgatgtatggccctgaaaggttattctggctactgtatggagaacaaattgtgaggggccagaataaaagcacagtgtctagttaaatagtactggtaagtaataagtcatggtggtttggacagaggttgcagtaagagttatagaaagatgaatatgtttgggagatgttttggaggtaaaatatatcttactgagtttttattttgagaaatgaggcatatggtgatacagtttacagagatgaacaaraatagagtgaaacagttgagagtggctgtgaaacaaagagttctgtttgggtaagtttgggggatgcaagtggaaatgacaggtaggcaaatgtgaacctggagttcagaggaaagtcagacacagctgctacgtacatgttcacgtgcaggttatgttctgaacttctggaatcaagcggtacaatgtgtgtgacctacagagcatcactagcttatatttggggaccattggtctatagatagtatttaaagccactggaatgaatgagaccagtagacccaggataattattcttaattaatgctgtattttcaaaattcattttcaattccttatcaagaatcagttccaacaatttattttgagttatagtaaaatttaaattatcttttgatgaaaaagtatatttcagatcaatgaatttcttttgcatagatcttctgttgatggataataaaattcaagacattctgtcaaacttgtaaagtgttcagtactgacattttgcagatattatcaagatcatttacttcattaataattgttggcatcagtttcatatattcttttccaatactttcatggtttttgtagcttttgattggtttagttttgtttttacatttaaatcttatatccatctggaatttattttagtgtaaagtgagaagaatgaatctaaatttattttattgcaaatcttagccagctgtctcaaaacacataccatataaacctaggctttttccattgatctgaaatgccatatgctaaattttcaagtggatcctattctctatttctggaatctatattctgtttttattgatccacctattaatgataggttatgtttttatatcaaattcaaattgcacatatactaaggaatttctatgttatactatctgtgcatttatcaagttgcaatgaaaattatttgctagtgtcccatgacattctttcatggtataagccagttctcgtatacattgagacaagatatcattgaaaagttatactttagctaccttctctgattcatattctgtcaacatttccaagcaaacatcttttagaaattgttatttactttaaatctattgtgtctataaatttaatacaattgaagtaaaaattccagttgtcagtttttgagacttgacaaaatactattaaagtttacctagaagaaaaaaatacttggaaaacacccaattttgtaaaagaattatgatgaaagaggaccatcattaccagatataaaacatgatgaaaataggaataaagaagtatttttttggcttcattgccaacaaacacaaggagtttattattattattatatataaagcttatacattatacctgtattgtcagcaaatgagatttgaagtttttgtgcgggagcacgttctgatgacactgttgcaattacaggaacccattctagactagttatcaaaattaaggagcttgtgctagaatgtaagttgactcactgcatccttctagaagtctaacttcaaaaaagagtcaattgagctaaagagtagtacaatttttttaaaaattgacttatgtaaaggcaatgtgttatatgcaagaatatcctctttatgatgtggtactatagaaactgataaattcctgttgttgcatgctgaggtgaagtactcgtgtttatcaagggaaaagttctgttgagaaagtctgaattcctagtgttcctgcaagataagaagccagtttggtctaaactctttgaagagttctcaactttttaaagatatgaattagactgacttacctattggtctgatatctttggtatttttattgatcataatcctccctgaaagaaataaatgcaacttggtttttaaaggtaaataatgccaaaggccacctggctatcccacaggcacctcaaattcaacattccacaatcaaattcattacttttcccccaaacctgtccttcctcttccttttcttttttcttttttttggtgctaattgttatcactctctaccttaattacctaaatccaacacctgaacatcagccgtagcctctcccttgctttacttttatatccagtccctcctcaagttagattgcttttaattccttatcatctctcctataagctccttctagtggccctggttgcttytgccttgggtaggtcctgatcttgtctacactggacttctagcacttcactgagcagcccattcatcaggtggctgccagaatactctttccaaatgcaaatttcttcacattagrttcctactgaaggccttttatgagctctcctttacccataggagacattttaaagtcttcagagtggcattcagagctstccacaatctggcccctgcatctctccagcctcagatctttacaccctcctagcatgcctcactccagctatacctgaccacttggagtgcttggaatcctgttttgcttcatgcctttcactttcactcacattagaattctctcccaccctttttgggggaggatctattaataattatctttcaatatttagttcaacaaacctggaagcatcacattacctgacttcaaagtatactacagggctacaataaccaaaacagcgtggtactggtacagaaacaggcacatagaccaatggaacagataagagagaccagaaataaggccacacatctgcaaacatctcatcttcaacaaagctgacaaaaacaaacaatggggaaaagactccctattcaattaaaatggttctgggataactggctagccatatgcagaagattgaaactgtacctctttcttatactgtttacaaaaatcaacccaatatggatgaaagacttaaatgtaaaacccaaaatyataaaaaccctgaaagacaacccaggcaatacaatcctggacataggatgggcaaagatttcatgaaaaaggcaccaaacgcaattgcaacaaaagcaaaaattgattaagtggcatctaattaaacttaagagtttctgcacagcaaaagaaactatcaacagagtaaacagcctgcagaatggtggaaaatatttgcaaactatgcatctggcaaaggtctaatatccagcatctataaggaacttaaatttacaggagagaaacaaccctattaaaaagtgggcaaaggacatgaatagacacttttcaaaagaagacatacgtgtggcctagaagcatatgaaaagaagcccaatatcgctgatcattagagaaatgtaaatcaaaaccacaatgagatatcatctcacaccagtcagaatggctactactaaaaagtcaaaaaataaaagttgctggtgaggttgcggggaatagggaacacttatacactgttggtgggagtgtaaattagttcaaccattgtggaaagcaatatggtgattcctcaaagagctaaaagcagaattaccatttcacccagcaatcccattactgggtatatactcagaggaatataaatcattctaccataaagtcacatgaacgtgaatgttcattgtagcactcttcacaatagcagagacatggaatcaacctaaatgcccatcagtgacagattggataaagaaaatgtacatacccaccatggaatacyatgcagccataagaaagaatgagatcgtgtcttttgcaggaacgggtggagctgaaggctattatccttagcaaactaatgcaggaacataaaaccaaatgctacatattctcacttgtaagtgggagctaaatgatgagaactgatgaacacaaagaagagaatggcagacactggggcctacttaggagtagagggtgggaggagagcaaggagcagaaaaataactattgggtactaggcttcatacctaggtgatgagataatctgtacaacaaacccctgtgacctgagtttgcctgtacaacaagccttcacatgcaccctcaaacctaaaataaaagttaaaaaaaaatttagttcaaacttactacctttaggtaagagaggtgttgcctgtcttcacccacacattttcccacagaattaactcctcttccttgtactcctattgtggctcctttactttatactacaacacttacaaaaatatacccatttgtttacttgcttccctaatagtctggaagttccttatgtcagggaccttgttttttattgccagtgtctagcaatgccactactatttaggagctctgtaattttttttttgaatgaataaataagggagaaggttcagaggcatgatggaaagggtttgcagagaatgtaatagtgttaaagctggtcagggggaagacacatagggcaatatggtgatgagagatgggaaaggctagtctactaagggggacttgtctgtgtatgatgggtaagagtcatgggaataactagctttaaatttctgactagaactctggtataaggttattctattgctgcagaagtacaggtgctacctgaagtcaagtgaagtttgctggatgtcattcaatttgcaagtattagcacacacacacacacacacacacacacacaatttttatactagcaacactgcatttatctagtgctttacattacccaaagttcttttatttccattatcttatttgacccttaaaacagttatctccctcagcttcagtttccttatttcttcggattgtttgcaagatgtgttatatgtctgatacacagttaaataccaaatgtgttattgttacatcaggaatttgaggctcataatagttaaatgacttgctcaaggtcagaaaggtaagttagtggcagatttagacataaagtctagattatttttactgcactagagtacaatgggatactatcttctacattacttgagctgcaacatctttaatttccttgagagacttacccaaaagcaggctttgggatgactctaccagagctgattatcaaatttaagcaaaatctacctcctggataaaccaaaatgcaaatataaataatattttttatagcttgcattgcttcctaatctccatcttttacacttgaggattttcagcagagaatctgagcagggtaacctcttgcccttgtgaagttttgtagatattttaattgcttgttaaaatattgcttttgagtccagttttatggtagagcaagtatcagtttggggttttcagcctagaattaaggtagcaggcatctgaagtgaggactggaacacaaagacaatgactgtactatgtagacactgacaatcacacccatatgtctgtggttttttatagagttctgctgaggaagaatctgaagccataaaatgtgaacgagagatgaaagtattaagtgaaactgtttcagcaggtattctaaattacattttaagaatttaactttattgagattttcttcttacagaagaaatacaggatcattgttaaaaaaattcagacattgcaaaaatatatttaaagtgaaaattcttcatagtcccttttctgagataccagtgttaacagatttctttgctcaatttatccctgtctctcttaatttctaataaaaccatgggattatattatacaaatgtttttgttgagaattacttttttcccacctaacaacgtgttacatacatagaacacaatatatatttcatgtaaatgaatattcaacattattctaagaatacattggtaacctcactttttgaagtagttgtataattccatccaataatggaacactttttaaatccctattgataggcaggttgtttctaattttgtattactacaatattgtaatgaactttcacaagtacacatacacaactgaaaatctcgcaacacttctgggtattaacaagtgtttgcattcagtcttgtcctggcaaatagcagttggatatagtttagaagtgtcaaggcaatagcgatgtctaatttgtcaatcttttagtttgagatttatatacatcttttctgttaactttatgcttctttccccataacttctaggaatctattttctatatatttcttagcatattttttcataacaggccttaaacttcactttttctttcttcttcttcttctccttcttttttttttttttttttttgagatgagatcttgctctattgcccagtagtggtgcagattatggctcactgcagcctcaactgcccaggctccagtaattctcctacctcagcctgctgagtagctgggaccacaggcatgcaccaccaggctagctaatttttaaattatttatagagatggggtcttgctatgttgcccagactcgttttaaactcctaggctcaagcgattctcccacctcagcctcgcaaagtagtgggcatgaatcactgcccccagcctgttttcattttaataataacacatgcttattgtatggtttcatagatgaaataaaaattatgtcctcccctataccccaccattactcatgcctgtttccacttccaaggtcagctctatgaatcattttgagttaactgctttttgaaaagttttagtagctggttgaatagaaacttcctttaccagtatgagaatttttaaatttctttcctaagaacatactaaactgtaatytatttgaaaactgttaatctgattaattttagcacagttgttgctggtagagaattcttctgaaaagccagatttctttgaagacaatgtggtggatttatgccagttcacaactctgggtggagtataccacttggatattttggagcttcctccacagtgtaaaccagtgaagggatggatgattgtggaagtaggttgattcttgaatcaaaacttataagtaaaataattgctcacgcttttactttatttcatattatctaacatctaawaagctttaaccytattaaacacaaaggaaaaaatgtaattttaaactgtcttaaatgtattggtattgaaaatttgaatcagatgctaaaagaatctaaaataatatgacgtttgtactagaattcagatatgttaacttcattgtaaatttacatcattatgttttgttagtgccaatttggtcttaataataatattctagatcagaggttggcaaactttttctgtaacaggccagatggtaaatattttcaccttcgcggtccctactagctctgatgcagctactcaactcagccattgcagcactaaaactgctgtgtataaacgaatgggcacagctatgttccaataaaactttatttacaaaaattggtggtgagtgggatttcccagggaccgtagtttatggactccagtctaaatcagtggttgttaatatgtgttccctcgagcagaggcatcagcatcctctggcatcatctgggaatttgctagaaatgcaaattaatgagccccacctcaaacttactgaatccgaaaccctggaggtaaggctcaacaatctgttttggaaaaatacaccctaaagtttggaaatcactagtctgaatccttgacatacaaaatatggtcctaaatcaacagcattgaaccagcagcattagtgtcagttgggaacatgcaagaaatgcataattttgggctgcacctcagagctacggaatctgcagtggaacaagatccccaggtaactcctatgcatattgaagtttgaaaatcaccagtccacatgatgccaatgctgctgatgccctgaccacactttggtgatagtagttgttagatcatctttcaaggagtttctcacccctgttttataagtagtaacacttgcgctattattgacttggtttatttattttttttatttttattttttttgagacggagtctcgctctttcgcccaggctggagtgcagtggcgctgtcttggctcactgcaagctccgcctcccgggttcacgccattctcctgcctcagcctcccggtagctgggactacaggcgcccgctaccacgcccggctaattttttttttgtatttttagtagagacggggtttcaccgtgttagccaggatggtctcgatttcctgacctcgtgatccgcccgcctcggcctcccaaagtgctgggattacaggcgtgagccaccgcgcccggccgacttggtttatttttaacttaacctcgtggtggcttgcttcccatagaatactaccatatatacccagttatgttgtcataggctgccccttccttcctctctctctctctctctctctctccctcttcctgcctctctctctcttctcaccctctctcccctaacacacctgtacacagattgctgggtacttctcacccacagtcctatccattaaggaccttggtgcattcttgtttttgagaagtatttcccaaccttttctcccccgttattttcctaatcacctgccactccaacaaaattttaatattctctttatccataaggtcccagcctgagctggggttttcaagaatccatctaaagatctgttgttattgacttttgtcacagtgtcctgagaccacttcatgctctccccttgaacccaaagagtcctccttcacagctgtttttctctcctgcaacaaagaggctttcctcattttcaaggctttttcaataactttccacctcttctagaatcttgccctaatttttcctctattttctaatatttttaaatctttcttccttccctagatccttgtctgctgcattcagataatgcacaaatcttccttatcccagaaaaatctgctgtctggttaattcactttcattcattcatttcctttcttctcaataggttgtctatatgtttctttttctctttacctacacacccttagcatggtattagagcatgtgatttagggtcccatacaccggtttttgagttctggtgccactttgaagtcattttgtaatctttgtcaaattacttgatttttctaagtcttagttatcatttctgttaaatataggcctttaggattgcttagaggaataaaatgttgaggaagccccaccacacaatctggcccataggaagttctgtacattcatatttagtaactttttttctcaatcatgtatcttttaaattttgttgtgacattttgttaatctatrtataaataggatcaaactgcagtgcttattaaaaataactatataacttattcagtackatttacatttttcactgctaccagtcaactaacttgatgttgttttggtcattttaaaaagatactcaaagaaggattacagaaatacacatatcctccggaaactacagaagagtttgagacagaaaatgctttcccacctatagaggtcacacttgaggttcatgagaatgtaatcttttttgaggatcctgtggttgtaaggtgggatgctgaaggtacagcttttataattatgtaataaaaggagggataatcataaaaaccctyaagttgaaacagaaagtgtagtgtattaactgagcttactatcttacatatttctatgccaattcaagggtcttgttttgtttgttcttaatggaaatgaataagtgttggagtttaaaatttgctgagtgttgtaactattaactcctaaagtatctgtatctgccattgtctatgaacaattactttatggttatatcattatgtttctaaaaaacgagtgaaacactgggcaygrtggctcatgcctgtaaatcccagcactttgggaggctgaggtgggcagatcacctgagctcaggagtttaagaccagcctgggcaacatggtgaaaccccacctctctactaaaacattacaaaaattagctgggcgtgatggtgtgcacctgtaatcccagctacttgggagtctgaggcatgagaatcgcctgaacccgggaggtggaggttgccatgaactgaaatggtgccactgcactccatcctgggcgacagagtgagactctgtctgtctcaaaaaaacaaacaggccaggcgtggtggctcatgcctgcaatctcagcactttgggaggccgaggcagatggatcacctgaggtcaggagtttgacattagcctggccaacatggtgaaatctcatctctactaaaaatagaaaatgagcggggcgtggtggcacacacctgtaatcccagctactccgcaggctgaggcaggagaatagcttgatcccaggaggcagaggttgcagtgagccaagatggcgccactgtactccagtctgggccacagagcaagactgtgtctcaaaacaaaacaaaacaaacaggcaaaaatgaatgaaaatattaaaatcaggccaggcgctgtggctcacgcctgtaatcccagcactttggagtgccaaggcgggcgtatcacctgaggtcaggagttcgagagagcctggccaacatagtgaaaccccatctctactaaaaatacaaaaactaatggggcatggtggcacatgcctgtagtcccagctacttgggaggctgaggcaggagaattgcttgaacctgggaggtggaggttgcagtgagccgagattgcgccactgcactccaggcagagcgagactccctccgtctcaaaaaaaaaaaaaaaaagaaaaagaaaatatcaaaatagtttagcaaatcaaaaacagataaaaagtctactcttctgaaataaccaaatagtttggatttggataattagtatttgattactttaatgttaatcgtttataaattgtacacaagtattggggatgaggaatgggcaaatgggaaacctgagaaagggaaaactagccacttgtatacctttttatacctttttatttttgagccatgggacattattgcttattcaaaacttaaatattaataaaattataagtatctacagtgatataagctaatgatttgttaatcattaacaaatacctcttttggagtaggcttgctgaattttgaaaaatcttggtctggtgagttaatgtatgccattttaaggatcctagatgagaggagtacacctttgtttttaaggttgttttatatccatctgttggtgaagggatttatatacttggtgataggctgggaacaaatatcactaaggcacagagcttttacataatctacttatttagttatggaaaatttaggaacagagaatttaggaatttataccaagaagtttaaatattttgtattttaaattttttaatgaatgccctggtgctctacatttttgtttgtatagacagacctacaagatgtattatttatattctagaaatagtctatgtattaaaaacagtaggccggtcgcagtggctcatgcctgtaatcccagcactttgggaggctgaggtgggtggattacttgagctcaggagttcaagaccagcctgggcaacatggagaaacaccatctccacaaaaagtacaaaaattagccaggcgtggtggcatatgcctgtagtcccagctaccccagaagctgaggtgggagcattgtttgagcccagcaggttgaggctgcagtgagctgtgatcatgccccagtactcagggtgggtgacagagtgagaccctgtctcaaaaaataaaaaataagttaaaaaacctagtaaattcttacatattaaactataaaatacatcaacatgaacaactgtatctcttttgatattgtttcagaggtgtcactttaatggtaatattcctaagtatttatcacattaaaaattattaacacagctgggcatggtagctcatgtttgtaatcctagcgctttgggaggctgaggcaggcggaacacctgaggtcaggagttcgagaccagcctggccaacatggcgaaaccctgtctctacttaaaaaaattagccaggcgtggtgtcacgtgcctgtaatgctagctattcaggaggccgaggcaggaaaattgcttgaacctgggaggcggagggtgtagcgagctgagatcgcaccattttactccagcctgggtgacaagagtgaaactctgtctgaaaaaaaaaattattcacatgaaattagaattagacaaggtaaattattccacacaattcaggggaataatttcgctctacaacttcagtaattagaaagcagtaatttacaattctagtaatttttaaaccatggggaaacattttgcccggaactactagaaatttggagaatttatttataggtaataactttttaccttataaattaaaattatttgttaatgtagcgacaaaaagaggaattaaaaataagtttgtgaatgtaattttatttattatatgaaatttaagagtaaaaacttgtcaacagaaccctccaatcgagagcaggaaagagagctaagtagaaatggagagcacgtctgggaagaaaatggttcatttatttgtcctataaagatgacccctccccccaaccaaaaaaaaaaaaaaagaaagaaatacagagataaatgaggcatagtttcttcctcttggagtttcaaaagttgtaggaggggcagatgggaaaacaccacattgtgatacaacatagtagggtgctagcatagatgtaaagtgctatagagcacgacacagatggctcaatctttagagtattggaaggcttctcacaggttggaatgttgaacaggtccctcaaagatgaagagaatgtttgcatgcaagtctctgtgtggacatgttttcagttcagtatgtacctaagagtggaattgctgggttgagtgctgagtttatatttaactttcaaagaaactgccaaattgtttttcaaagtagccgtaccattttacatgtctgccagcactatatgaggttttctgtttgttcataacatttgttatttatctttttgatgatagccattctagtgggtgtgaagtagtattccattgtagttttaatttatttccctaattactaataatgttgatcatctttttaagtacttattagcctttcatatctcttctttggtgaaatgtttattcaaatcatttacccacttttaaattaggttgtgttttattattgagttgtaagagatacaaaagaccacctacaggaagtacattaatcgttgcctggggctggaggtgggaatgggaattaactgtaaatggacataaggatcttactgaggggataaaaatgttctaaaactggattgtggtgatggttgcacaactgggtaaattaaagataattgaattgtatacaaaaaatacatgaattttgaagtcattttaaagcaaagctgaagagagtttctctgaaagattagggaacagtattgtaggaggaaagaactgtatgtgctgaggcccagaggtatacatacagtgttgttagggaaagaaaaaagtggggctgaaaagagaaaaactttttcccttgaggagtggcaagggatggagccaagaaagtgagtcaaagcttcattctgaaggtcttaccatgctgaggaggtgggacttgatcctgtagtcaggggaaatctctcagcgaagytggccttcttttgagtttctattctaaatatgaaagatcaatttatacacaaagcaatttttttggtgctttcatttatctttttttaatagggaaaaaatgaaactagtgtcactttcttcatcaattataaaggtaaacattggagaactgatggcatcagcaatgtatcctacaaaccaaaagaaagacttgtaacattcagcctggacacctttggccctgttaccttgattcaagatgctcatattaacatgccgtaccagtcatgggaactaagaccacttgatgtaaataaagtacttttaactgtgactacagtatttrctgagattcaaatacaaattaaggtgagttactcttgtagctgttatgtactatcrtatcagaggtaaaccattttgatggaatactagtttgtcaaaagcaatcagtggctgctgatttatatattgaaatataagtgtcttataatgaccttaaaaatgtaccttgagctatatttctaaatgaaatattagttgaataattaaataggcaataacatgtaaatagcaaggctcaaacttaaatttgtaccctaaagttactagggatagatcaactgatgaaccaacaaccctcattgcagtatgaatttcagagtttttgatccaccctaaaggggctacgtgatgtttatcatccagccatttgaaatcctttttgaggttggtttctctctgaatgatcccctattgctcatcagtcagaaattacatagcctgggccgagcgcagtggctcacgcctggaatcccagcactttgggaggccaaggcgggcaatcacctgaggtcagcagttcgagaccagcctggccaacatggtgaagccctactaaaaatacaaaaattagccaggcgtggtggcacacacctgtaatcccagctactcaggaggctgaggcaaaagaatcgcttgaacctgggaaggggaggttgccatgagccgagatcgtaccactgcactccagcctgggcaacagagtgaaactctgtctcaaaaaaaaaaaacaacaaaaaaaaaacccagaaagaaagaaagaaattacatagcctgtaatgtttggagacaaaagtagattagtggttgcctggggctgagagtgggtggggattaactgtaaatgagcatgaggaatcttattgggagggatgaaaatgatctaaaatggatttatggggatagttgtaccagtctgtaaagttactaaaaatcattgaattatacacttgaaataggtgaattttatgatatgtaaaatatatcttaaaaagttgtttttaaaaacagagatagcctggaattcatcatgagtacagaaagcctagaatattattaaactttgcttttaaaactagatgagggctgggagcggtggctcacgcctgtaatcctagcactttgggaggctgaagtgggtggatcgtgaggtcaggagtttgagaccagcctggccaatatggtgaaaccccatctctactaataatacaaaaattagccaggcatggtggcacacgcctgtagtcttagctactcaggaggctgaggcggaagaatcgcttgaacccgggaggcggaggttgcagtgagccaagattgtgccactgcactccagcctgggcgacagagcaagactccatctcaaaaacaacaacaacaacaacaacaacaacaacaacaacagcaacaacaaaaaactaggtgagatgggagatggagtgccgtagaattgttagtgtgcaagtgcccttaaaatgcttctggtctaccctcctgttgtatatagagagaaactaaggcccatagaggttaggaggttatgtgacctttctgagattgtgtaaggggattgtattgctggagcctcctttcaggcttccctgcaccattccagcagccctgacgacccttgtgcagagattcttcctctagactcatggaaaaatacaagcatcttcacaaagttcacttattaatatgacgattgaaacacccaagactgttcagtgtgcgttttcaggttagtagatctgtgctgtctaatgtggtagctaccagccgtatatagctactgcatgtgactagtccaaattagcacatgctctaactgtaaaattaacacaaattttgagttcttggtatgaagaaaaaaatgtaaactctcaataatttctatactgattacatattgaaatattttagatatattgggttaaatgaaatatattattaacattaaaaataaaacagatgtgtaggctaggtgtggtggctcacgcctgtaatcccagcactttaggaggccgaggtgggcagatcacaaggtcaggagatcgagaccatcctggctaacacggtgaaaccctgtctctactaaaaatacaaaaaattagccgggtgtggtggtgggcgcctgtagtcccagctactagggaggctgaagcaggagaatggtgtgaacctgggaggcagagcttgcagtgagccaagatcacaccactgcactccagcctgggcgacagagggagactccgtctcaaaaaaaaaaaaaaaaaaaaaaaaaccagatgtgaattctatacaccttcaaactgtcacttcgcgcaagactttaaaactggataataatattgcctcattatgttaacttttacggatgtgaaaagaatgatccctaaaagtataatcataattgttatctaataactattttaattcagtgtgaacatatgcatattcttatattacaatttctaaaataggaggcttgagagatgctatagtccattctttgaatgttctgatgaagcccaaaaagagttagtaaactgcttaacataacatggggactttgtgtcagagcattcagatgaggcttaagatatacttgccctgcattctttctaatatagagtgatagatgacttttaaaaatgtataaagcatctaaaggctgcacctggagtgatactgaagtaatgatttaacttacataaaagcttcttttttcttatttaaactaggaaaacctctgcatgttatcttcaatcaaactaaaagacaagaaacacatctctattttggaaggaacctggatgactcctrttcctttcattattgctttgaaagaagctggactgaatatctttcctactagacactctcatttttatgttattataaacaataaggcaagaatgaatctttccaaatttaatgtggcgtgcatttaaaatgttagcaattattaaatgttatataatttaatattatatacactgtattttatatattcatttatacagtattataaagaaataagtgaaaagaccagaaatccagggttctcttaattttccctaagaaagtaagcctgtagtgcgatcttcatattgacaaatggagcatatccacagacggtcagtttagtgcaaaggtagtttaagcaattctcattttatatactttctttttgcattactggatattatatgagatttcctaaaagagtaaataactgcactttcccaaacatggtaagttaggcagaattaaaaatacaaggaccaccaatgtacaaaacccacttcctttagtttcttggcaaagcctccatgtctgtgtactgtttcatgttcgtcataaggctttagttcagtaagatccttccaggttaaactgtgagcttcttgaggatgggggtcatttcttaatgaacattgattcttctagcatctagcatagtcctagaatatagtagatgcttagtaaacatttgtgatatatgaagacacaaagtaacttctaatcatgaaaagtgaatttgtaggcagaagagttctgtactcaagaatatttatgaatgtatcagaaaatgacaatataagtagatatttatataatatttagaaataagtgtatgtacatatatgcataggaaaaaaacccttggttttagtaactcaaattgcctgttactctacattgttgaatgtagtgttctgctcatgctttcagaatattctactccaggaaatatttttttctgaacactgtgtgctaggcactattttagatgattaggatatagcaatgaatgaaacaaaggtccttacctttgttttctttcacagtcgaaggaaaacrtttaaaaaaataaatgattagtatgttaaaaaggtgaaaagtgctatggaaaaaaagaaaaggtagatccggaatagtgaggctgaggccatatgacacccatattaaatagggtgtcagggagggcagcttaatgagagataacacttgagtgaaactcaaaggtggggactttagccatgtgcacatctggggaagcagcttcctggtaaacaactggagcaagagccccgagggagtggcttggtgtgctggaggattggagggacaccatggaaaccatggggcctggaactgagagagcaaagggagaagaaaaagaggtcggcaggtaatggggtatatgtggagtcgggagtagggatgtcagagggccgtgcaagtcgtttgttaactatggactctattctcagagaaaggaaagccattgcccagtgttgmgagaggagtcatgtactctgacttacaattttaagtggatccgtctgtgttgaaaatagactgaaggaggccaaagatggaggaagacttgttgggaggctcaaagatcaattctatttgtttttatattgacaggttcctttggtagaagtgaaagcttatcgacagatggccctactaagttctgcttttgcatttggttggagcaagtggaacctactatgtaattctacaaaagtcgtatttaaggtatgatatgtagaaacccataaaactactttgtcctccaaaagaagataaagtactcaaagactaaatgaatgtagaccatggcttcccctcttagaaaagttaaaaaaattaacattcaatacggaattttaaaatttcaaattttgggccaagcacggtggctcattcctgtaatcccagcactatgggaggctgaggtgggcagatcacctgaggtcaggagttcgagaccagcctgaccaatatggtgaaaccccgtttctaccaaaaatacaaaattagccaagtgtggtggcgcatgcctgtaatcccagctactcaggaagctgaggcaggagaatcgcttgaacctgagaggtggaggttgtggtgagccaaaatcatgccattgcactccagcctgggcaacaagagcaaaattccatctcaaaaaaaaaaattcaaattttttgtcaaaaatataaatctaaattatataaagtttatgcctttgttgtccaagctcttgacttcaagccaggccagagtccttgtatctgtttacaaattgactcaagaacaaatggaagccttgccgggtgcagtggctcccacctgtaatcccagccacttgggaggctgaggtggaaggatcgcttgagcccaggaatttgaggctgaagtgagctatgatcacaccactgcacccgagcctgaacagcagagtgagacccccatctcttaaaaaaaacaacaaatggaggcttttaacattaatatatctgtgacttacagcccctctcctctgagagggttagtcctccaacttaacttcctgataccttcttgttatcaggtggtagtaaccatatcaaattctaaaagctgatgaatattttggcctaaacaagccactgtatttattgctcttgtttattgtgtgtttcccccactcaaatataagccccttgagggcagggctttgttgttgcagttgttatttatatatgttgtatgtctatatttcttctgtgttttctttctctgttatatccccagcacttagaacagtacctcacacatgataggcactcaataaatatttgttgcatgaattaatacatgtggataagctccataatcaccaaaatataaacagtgtgatggtttttcaaaacccagtaatggaacacatagactgtttyttttaacctttgcaattttgggggataaattgagcccttcaaataataatytgctaccaaaatactgaatagaagaggaattattaacaacttgcttgaatttttttttttttttttttttttttttttttttttaggkgagggaacmccttactgaagaatgtactgagaatcctaattgggcccttttaatgtttagtggtgacagagcacaaagactgaagatcaaggaagagagtgaggcattttctgaagcacttaaagaagaaactgagtttcattctactttatatcacatggtgaaggattttgcttctgaggaagcaatggagaaagtcaggagttccaactgtcagtttgtcaactctgtgtgccacatgctgctctctaccagattgctcagctactcctaacctccacttacaaactgtattgtaagtatgaagaaccaagcatggtgaaagacaggtatttctgcaacacaatgtaatgagtgaatgaatacatttcaaatcaactattaaaaattttctaatctgcattttctactcaagttttattttaaaaacagtatttttttttcctttgaatacttggcctgttaagaatttcagctttcactctatsaagatttaaatgattctttatttcaataaactttaacaaacaatatataatatttcttccttaaaaagctcattcaaagatcataggcagacttcttccccattgtattttagttggggagataaaggcaaaaagaggaaatgtaagctatcttacagtcattctgagaacctctggtttcatgctatactttcccagctaaaagttactaatttacgaagttcagatactgaaacttaaaaatcaagatccatatattaggatgtcctgctgtcacactggtggtggcccattgtgtcggagtctggtaaatggccacaagatatgttctagagacgtccatgagtcctcttgctgtgtgggagcggcatccacagacttctggaataattggcctgtgaggaagctcatcaaagctgcaaacagtacaatgaatgcaatagagagccagagggccttattagcctttctgatggaggacttgagatttgttgcccaggaagctattgtgtcataactataaggaaaacacaaatagaatttggtaatcggtaatttgtcattagaaacattccttttgctaacaccaccagtcaggtgatctgcccttcatacccccaaaactgccttttaatctacatattatgatttatcattttggttttggaaacaatctgcctcccaccctttgtacctattaggattaaagaaatgatgtgctacgatgagaatctgaaaattacgtgatgtaggcagtatcttctaataagtacatacaagtatctcattctttcagtaaggtaaggcaacatattcctacagtggaaacaaaaatgttatttgctgggtagagtggatgtctgtgtatgtacttatgtgtgtgtacagtagtccccctttattcttgtgggatatgctccaagacctccagtggatgcctgaagctgaaaatagtactaaacccagtatatactgtttttttcctatggatacatgcctataacaaaattgaatttataaattaggcatagtaaaagatgaacaataactaacataaaatagaatataacatatattacagtaaaagttatgtgaatgtagtctgtctctcaaaatagataacataggttcaaggataacctgacatacaaagtttgttattcatcttaaatacaacaatttggcatgtcttttagtaatttgattaggattaatactgtcagccctgcctcaccctttcccattccactaaaatggtagaatttatcaagtagataacttacactgaagagacatcccactttgatggattatttttcttttcagaaagacttggcttccttgtcctttctactgtttcttctccagatggctctgagtcatctttagttctgtaaataaatgttgtttttaatatttgaaactaaggataatatgctataattattcataaaatattgctgaatcttactgtaactcaagaggctcacaaatatttgttctgttttagggaaagtcgataaatatctaactctaaaaatcaaatcaccagatttataatttaaaccttttatagaaatttaattaaaaataagttcttctatttagaaaaataataaatgtgtagaaagttagttagaatattagccaagtatatacaatagaatattagccaagtatatacaaaaagggaaaatttaaaaagaactttcagaagttagtctcatcattaaccaatgttattactatgaattctttctctgcatatatatatgcagagaaactctgcctaggctggagaagaaactctgttgcctaggctggagtgcagtatatataaatatatactatatatacacatatttatatataatatatacacacatatctacatataatatatgcatattaatatatgcttatacaaagtttataatatatacacacatattccataatatatatatttatatatataaaaatatgtatgtatatgttgtatatatgttttgtatatggatgtgtacatatacctgtgtgtgcgtgtgtgtatgtgtatatataaaacaaatgtgggcaccatatctcttccttttaaattttatttaacattagtaaaaatcttttctcattattattgattttattcctttctctgtatgatttccaatcagtgctaacttggagtaacatcagagtttttctctgaaaatcttaataatttaaaacgtgtttttgaaaatattctcagtataaaactggttaaaataaattagtattcagtgaactgggaaatagcaattgattgactgcattttaaatcaaatcatattatttaaagaggtgttcctccacctaagcaaaacataattgttccactatatttgctgatgagttcctagttggatttgaattttgaaatctcaagctcataataccctcagaattgccaaagggaaatgtgtctcaaagacttttttttcattcaaacatctatgggaaataaatatgatagactttagtttttaaagaaaacaagacccaaaagccagaataaattgcattgcatttctgtaagattctcaaggtttcagtcttgtttacaaagacttctcagtagaaatcataccatactaacaaaaagcaaaaactagataatcttttgaaggagactcttgaactgatttttttttccaaccagctcaaattcattatgttaactctaaatctgaaaagagtttgtaacacatgcagtaggctcccaggactttaaaaaaaagaaaaaaaccaaaacagattatttgaggattgcaccatgtcatgctcatctttatattccttagaattgagcagagtgtccatcccatggtaggcactcacgaaaatgtataaaataaaataaataaacataaaatcatctccttaagatccttcactttaacagatatgaaaactgaaggccgggcgcagtggctcaagcctgtaatcccagcactttgggaggccgaggcgggcggatcacgaggtcaggagatcgagaccatcctggctaacacagtgaaaccccgtctctactaaaaatattaaaaattagccgggcgtggtggcgggcgcctgtagtcccagctacttgggaggctgagccaggagaatggcgtgaacccaggaggtggaggttgcagtgagctaagatcgcgccactgcactccagcctgggtgacagagcaagactccgtctcaaaaaaaaaaaaaaaaaaaaaaactgagaccaagtaaggttaggcactttttctaatgtcacccaaggactcagaggtagcatttctgcatatccctccttcttgccctctacctttcactgtagaagtatatttgtttagtttactagatacagagatagcaattcagaatttcatgtttcctctactcttcacttacataaatggaagatagatagatgtacatacatgttacatatgtgcctatatgttatataatacgtacgttatatatctcatgtttttaaaaatatataaatagatggacattttacttctgtggctctttattgacctttccccattgtagacagacacctggacaggaaaaaaattatcttcacaaatatggcaaactccagggtcttttctaacttaagacctcaaactttgccattctgagagctatgagagtgaatgtattaatattcacaaataacacttatattgtgctttacagtttataaaagtgttttacaatgaattatctttttaattatacagcattatttcatctccatggaataaaagtgattcccattgtttatgccccagttcatgtcaggttaataaacacactgagcttcacctactttagttcacatttttcttcttcagcatctgcccaggaataggtgctaataaatcgaggtaatgagggacggtgttcactctgctttgaccccaaaatacgcctaaataaagatgattatagccacttgtcaaatcaaatacatctgtagccattatcaatttatttcctactgcttaagtaaatacaaaattatatgtcctaattattttttcttggcacattcacagatctcctactttatgataaaaaacttcataattagataccaatttatataattattctgtttacactttgtacaaatcaaacattactatatcacttaatttgagcactcatttaggttagcccaagtataaaatagtaaggttcccaaagaggaaccataaaattacacttaccaactgcttgaccttctactgaatcgatcattattttccatcccagccacctttagtagaagttcaaatgttaaaagaaatgataaaatatacgtttatattttctgtcatatgaaaatgaatttacctttgactaagaacacttaggaattgtcttaccattcctgcatttccaatatttctgggtaaagaggcaatagtcactcttcgtagagaagatggctaccagaaggaggaaaatgtacatttagaaaactctcaataatttatcattatatgcaacaccaataaatatccttgtacatgcatatccgtgtacttgaccacagctgagttaaacagacatatcttaaaggatcctcttgtggccaaattgtcttccagaaatattttaccaatttatattccacctaactcaatgttggattattataatttatgccaatctaacaaatatacaatttgtttaggtttgtaattatttgtcttctagaaacattgaacatttctttttatgttaaataatcatgtatttatcttctctgagaaccacctgtttaccacctttgtctatattaattttgtttatattgaattttgtctaaattgaattttcatatttctggcagaaattttttgttgttaatccagccaaatctattcttctcttttgctaccattgcttctgtgcttagaaagatttctcccaactcaggaggagataaatatgcacctacatgtatagcttttttgttcatggtttcatttttttccatttaacacatttaaggattttcatgatgttttaatgaatgaaagtgtttcttgagatttgtacagaaaagcattatatagtattatgtggttcttaaggtttaaataagtacatcaggataaatttttaaaatatgtaataaataaactaatttaagggggttccatgtgaatcgttttcttaaaccatcatccctaatttaatttcataggttagttgagcatcaagaatatgaaactgcggcccaagaaacttggtttctaatcatgctcctaccaatacatgatcataactgatcacttaacttctgtgtttctcttccctcatctgaaaaagagggatttgtatggaatgattttaaagtcacttattcaaaaattctgtatatctatgaaatcctgatttttacactgtggcaaaacctgccagttgaccttcagtatcacattcttccttcttagttagtaataagcctcctgatttttagctaggcatacagcctcccaaatacacgctgtattttccagtctcattcgtaacaaagaatggaaagagaaatgttactttggacttctagggggtgtctttacagggagagggaatacttgtcattgcttctttttttttcttggaatgagatgatgtaatgatgagggcttggtgcctggatctaaagtagccatcttagactctgaggcagaagccaagggctgagggtagtgaggcagcacgaaaggaggaggctgatccctcaggatcttgtgaagctgctgtgccattgtcgggttacccacttccaacttcagttttacacaacagagagaaaccattgttgtactgactttcttcatgctgccaggcacacttaattgatacaaaaatatagcagagagtataaaagcatacttagataaacaaatacatctatatgaattaaaatcactattttgttatttacatataaaggcctgaaacttcaaataacattttaaaa

SEQ ID NO: 6799 - DNA, 255439 bp, Homo sapiens
tggaattggaaggacagggagattgaagggtagcaagagaggctagagaagagagtgaaaagaccgcttacccgatttgaagttggtaaggtattccttgagctggtctgaggacccgaggtcttaggtggatctcctcatggagtgatggtgaggacaggggacctgtcttccgaaggagtctccctgtcctgggtcttcggcaccaaatgtcaagtgcgtccgtgtgaagagaccaccaaacaggctttgtgtgagcaataaagctttttaatcacctgggtgcaggcggggtgagtcggaaaagagagttagcaaagggagttagggttggggcaattttataggatttgggtaggtagtggaaaattacagtcaaagggggttgtcctcttgcgggcaggggtgggggtcacaaggtgctcagtgggggagcttttgagactcattgtccaggagaaggaatttcacaagttaatgtcatcagttaaggcaggaactggccattttcacttctttcgtggttcttcagcttcctcaggtcttctggatgtataggtgcaggcttgggctcagaggcctgacacaaacaaaaatgtatgctggcaattcctaagacatttctaacattaatgtaacaataattttaaacctagctcagtgaggactaaattctgattttatatcttgctcaaattcctgtgtaaggggtctggggagtcatgcgctacaaataataaattattagatggtttttacttaaccctatatattgtgacttactttccaacctgactgtggcataacattatgagacaaggaagcaaaacaaaatattttaccttaaatcatgtttctttgccatctattgaaatggcctgcaaagctgtcctttgtggggtaaaatgtgcatatataaagaatctctattaacatagctaaatctttttctttcaggccctctcaatcctaaagagattaactaaaagtctagcaccctttgaagatctgaattggaaatatttgtcatctattttctctaagggcagccactataagacttcaaaagaaccttggtctccacagtgttttttcttaacctaaatatttcctttctatgatccctggtctttagacaaactcaaccaattttcaaccagaaaatgtttaaatttacctatagtctggaagcccccctttgagttgttccgtctttctggaccaaaccaatgtatttcttaaatgtatttgattgatgtctcatgcctcccaaaaatttataaaaccaagctgcaccccaactacctggggctcatgttctcaagacctcctgagggctgtgtcatgggccatggttactcatatttggcttagaataaatctcttcaaatattttacagagtttgatttttttcatcaacattagtaaagattttacttaagttatgtaaacttgaaaaagcatttgactattttattttttcctgaataagtgtttgatttaagcacttttattttcttacgccaattaattagagctcttttatatattttcagtagtgaaacattgtgtacacaacacataaatacatagacacattaggcatgctgatagaggtacatctttttttttttttttttgagacagagtttttctcttgtcacccaggctggagtgcaatggcatgatctcagctcactgcaacttctacccgctgggttcaagtgatacttctgcttcggcctcccgagtagctgggactacaggcatgtgccaccacgcctggctatttttgtatttttagtagagacaggtttcaccatgttgtccaggctggtctcgaactcttgaccttaggtgatctgcccacctcggcctcccagagtgttgggattacaggcgtgaaccactgcacctggcctagaggtacctcttatagattcataaaaaacgttttttttccttaggctttcagattctttttttcccctcctccctccccgctactttcagattcttgataacctgtttcacaaccctaggcagttgtcagctaaatagccttaaatttgcatattaaagaaaacaactcaggtgaactccaaacagcaaaatttacattataaagtgtggagagaaaaagtctggtgtgctagacggaaattgaaacagatttaatggccaattaaacataaaattatagaaattataaaagccttttaaatacacacacacacacatcctatagcttttacttcagaacttttagctatgagataaattcaaatttaccggtttgcaaaaagaacttgttggatctaaactgtggtttttatcttaacagaaaataatggcagatttagagcaggcagaaaagaatagagaaaagaggtcttaggaactctataattagtaggtcgaccttagggctctttttccttaatgtaaatgtgcacaaagaccatattttttccattttacataaactttggcagtagaggtgccataaaacctacagagtgctcaaaagagggtcattctccttgttttcttctcattcttagattatttgttttccacttctttttttcttaaaaggagaaactgagctgtggcttagagtttctgtgtggtggatcatcacgtgctgcttgtgggcaggactccacaatgtgccaccactgaatggtttccaccctcttacatgtctcagtttctctctccagaggtttatgacttctgagagggctcacaacactgggtgatcagcccttcaatgtgtttcctggatgagccagtttttaaattaaatatatatatatatatttttttgagacaaggtcttactctgttgccccggctggagtgcagtggcataatcttggttcactgcaacctccactttctgggttcgggcaattcttacgtctcagtctcctaagcaactggggttacaggcacgcaccactacacctggctaatttttgtattattagtagagatgcggttttgctatgtttgtcaggcttggtcttgaactcatgacctcaagtgatctgcctgcctcggcctcctgaaatgctaggattatgtgtgtgtgaccgcacctggcctaaattaatttttgttggggatttccctgcaggaccactgcacatcgttcggggtcaacctttcagacactcccacaaggtccccagtcactcaggggcacctttcagttgggaggggcaaatgccctttctttttggagctgagaaaactcagtctctgatatacctatgaaagcaacagttcagttcctcatgcaaatgcacacagacaaacggaattgagattaatgttgggagaaaaagcaatataaaggatccttcagaacggatctccaaactagaattaggatttttttttttttttgagatggagtctcgctctgtcgcccaggctgagtgcagtggcacgatctcggcacagtgcaacttccacctccctggttcaagcaattgccctacctcagccttcgaatagctgggattacaggtgcacaccaccaggcccggctaatcttgaacttgtggggtcaagtggtccgcccgcctcagcctcccaaagtgctgggattacaggtgtgaaccaccgcacctggcctagaattaggattcttaaacaacgacttcctaggagagaaaattaaaaaaaaaaaaaaaaaaaaaaaaggaaacagccaaaaccacttcctataaactgtgctcagccacccgtaactttgtagctcttttccaacaatatacacaccaaggtcaaatcctctcacagtgcaaggtcatctctggcacccaaagccaaaaaggtcaggtcatgcaatacaggaaaacagagctttagacctaagaagaatctgcccatgactcttgaaatcccacaaagccaagagaacaccccaaaagggggtgagtggcacctttgttctaaattctttttttttttttgagatagagtcttgccctgtcacccaggctggagtgcaatggcacgatctcagctcactgcaacctccgcctcccaggttcaagtgattctcctgcctctgcctcctgagtagctgggattacaggcacgtgccaccatgcctggctaactttttttgtatctttagtcgagacagggtttcatcatgttggcgaggctgagtctcgaactcctgacctcgtgatccgcccacctcggcctcccaaagtgctgggattacaggcgtgaaccatggcgcccggcctaaattctttaaagaggttcaagtcattagaagccttctctcgattttttggtaatgcagatggcaaagggtgaaggaggtatagggtggaagaaaagtaaacaaaagaacaattgaattttttttttttttttttttaatttgagacagagtctcacactgtagctcaggctggagtgcaatggctcgatctccactcactgcaacctgcgcctcctggttcaagcaattctcctgcctcagcctcccgagtagctgggattacaggcacccgccaccatgcccggctaattttttttgtattttcagtagagacagggtttcactatgttggccaggctggccttgaactcctgacctcgtgatccgcccgcctcggcctcccaaagtgctaggattacaggtgtgagccaccgcgcccggcctaagaacagtttaatttttaagaccaggaagcaaacacagaaaccaaatacatggttttttgttttctgtttgttttttcttttgcagctgtgaggaattttactcaaattagataggccttgttacccataatttggaattctcacttggatttgaccaagtgaagtagagttggtcaatgggaaaaagacaaacaaaataaaaaaaaacccaacaatatgatcactgagcactctaatggtaagcagaaattaagaccagctggttgttaactttagccaagacaaaaatccctattcagctacttacctaggggtgcgtctcaggctgaaaacggctgtctaccatcccagaagtaggaaaaaaacccctcatcttccctgttggaagtgagctcaaactccataaaagagttacctgccttccctcgtcatggaagcaggaaaacttgccttccttgttggaagcaagtaaaactccaaaataataataataataataataataataataataataataataataataataatagagggagttgtacaacaaaatgaactttagatctcgaccaaattttgggagatcagggattctctggagggggtgctcctagaccttagcaaattgtcctgttggtttgagccatggagttagctcatgttggtaccaagcatggataggagatttgtcaaagatcagaggtatctccactcacaatccctccgtggttaccatccttcattcagtaaatatttacggactgattaccatacactaggcactattccagacattggagatacaatgatgagcataaaaaacggtctagataagaactgaggtctccagacatactttatgcccactcagttttgtcttttgccctagttgctaaacaaaacttaactttgctgtgcggtgcgacttcgttaacttaaaattacaggctgtcagctatgaccgctagactctaagaaagtccagtggaaatccttcaatgaaaagaatctgttcttgggtggaagccccgctcatgcaggaggaacagagggcttccattctcgcgtcacacaactgagggtcaaccccttgctccctgcagtaagcctgattagtgggcggagcttccttcaggatcgcaagaaagaraggaggaaggggaccccgcctcctacgtgctcgcgggggggggcggggtcggtggactgggcgtgagttaattggctggggggcggggcaccacgggttggctccgcccaggcgctcgcgcggatcccgggtggaatgacgggagggagtcccggcagctcctacctcccagcgatggcgtcgctgtgccgcgcccagtccccagcctgccggccggtactcaccgctacccggagttcgctcagacggtgagatttggggcgggtccgaggcagcggcgggacgctacctgcgaccgggaccatgaggagctgccagacccgtggggccggtaacgagagcagtcgcggcacctgctgagaggaaagagggagcggtccggcgcggctggggcgcggcagaggcttgcccgatcctcggccatgtcactgctctgcgtgcgcggtgagtgcgcggactgaggcggggaggcggggtgtcggcgtagaggtccccgcacccttccagtggacgtccggtgaccgtctcacccaaactttacatcccgtccgtgctttgggggtctattattttggcaatcacttaacaatcacttgagttctttccactttcttgttttcccccaagctcctgcaagggacgattagctctccattctggtagccatgtgacaatgttgttggactgcaggctcagatcctattaaacagtgactggggttctctagtgagagtggacgagttagaagaccgcggatggttggtgcctgtgaatggtgggcagcctctcattcttttcctcctcctcgcaccgtaacgctacagtatgcttagtagcaggttctttttatcacactttgaatgcgttagtggtacagctgtcacatcccttctattgcttgtcttgtcccctgccacttccctgaacactaaccggtagtataggctaagattattcttctgttccacttgggaggatgtggtgactgcttttgaggataagaggtatgatttatttttatttttattttagcttgcctcacagtaactcaaggtgaagggccattattgcttttcccctgaggacacttgacccatctaagaagatatcttaaagcaagagctttggggtttaagatgaggcatggtacgcgaactaagttctatgtgggtagagactgtttcttattagtttttgtattcctggtgtctgacgtagtagaagcttaatgctggttttgaatgaatgcaagtactgtgacttcagagagattatctgatcaggaaaacacagggtttggattagccattgaatttgatctcgggaaattcaggttacagcctatcatatctgatgtgtcttgattatgaatgagagagcatttatcaactagagcctttacctgatatcttttactggagagttcatatttcttttggctctacagattagaagcattgttgttgtttgtgatttctccaataacgatgtttcccccagctactggcagatgaaactgctttgctctgttctcttccactattttgttgaatctgcattaaccaaaatggatttggccatttcccgggattatgagatatacagtttttcttctttcatggttgatttttcattaatgagaattttgctttgcttttagtaagacattttctctcagcagctgggaatctatttattcctttagatccctgctgctgagtagcaggatttgggagaggttggactttgctgtgtctcttggacagtttaattctctacggccacactgtattacagagctggtccttatgaaagactctttaggcaggagcactcgtgaatcagaaattcctatttaactgaatttatataactactggtgttttcatttgttttaatagcaggcaggtttcattgtctagaaattctgctatttagctaacttctttcctttttaatgttactttagtgaagtttcttcttttttgaatctggagaaacgagatcagcaggccattgtctttttgaatagagatctagaagattttaaatactgaaacaaacaggtaccttatatgcagatattcatattgaatggcaaagtattcattttgggaaaacttacagaaatgaattgaaatacatctttatttttatttctttttctttttttgagacagagtctcattctgtcacccaggctggagtgcagtgctgcgatcttggctcactgcaacctccacctcctgggttcaagtgattctcatgcctcagcctcccgagcagctggaattacaggagtgaaccaccaggcccggctaatttttgtattttttgtagagacagagtttcactgtgttggctaggctggtcttgaacttctgacctcaagtgatccatctgccttggccttccaaagtgctgggattagaggcataatccactgcacccagcacaaaatacatctttctaaaatgacattccttgcgttgtattttggcagtaggaatgttgtattctgaaagcagtctatatagtgatatttattacaactcaatttcaattcatcttggagtagaatcaattagaaacttcctatgcagagttcaaaaagtagttaacttgatgtagaaattggcaaactggtattgaattaatcattcctaaacatttcattcaagaagtcagttattttgtcttgccctttaatcatgccttattgcctgcaggtttaaggctctcaatactctgactccagacttgtggccttctattcttgcctatccttatgcagactttgctctagcactaactttgtttattcctgcctctgctctgttctgcacttgtgccccctgaaatactcgttccatattttctgcctatctaaaatgtattcttactttcccagctaacagtctactttttttgttgttgaaaacttcttcaggtccccagtccacagtgatctctttttcctttaaatcctcggagcacttgtggtctgaacagtgccactagtttggaaatgaatcatatgctgcctgcaactggtcttgtattgtggtgcttatggtgacccagacaaaggaagtaattgcactggtcagatcagatctggaattttgtgttcagctgtggtatttccttctaagaagcatattgagaagctaggttatcttaagaggggagtgattagaataatgaaacatgtaggaaccgaaccatttgaagaatatgggaaatttagttstagaagatttaagaggaagaggatcacgatagtacatgaagactgtttaaaaaactgtcttgtagaagttatgtcaccttttttgttgtcattccagaggacagaactgggacaagtgtggatcagtggttgaaaatgacaggaaattagattttagcttaacataaagaagaacagttgggttgttcagaacaaatggaatgggctatgtagattttttgacactaaacagaaattgaatgagtggtaaggattctaaaggggatattgaccattcagcgggtgattgacttgaatttttttttttttttttttttaattttttgagatggagtctctgttgcccaggctggagtgcagtggcatgatctcagctcactgcaacttctgcctcccaggttcaagcgattctcctgccttagcctctggggtagctgggattacaggcgcctgccaccatgcctggctaattttttgtatttttagtagagacggggtttcaccatgttggccaggctggtctcaaactcctgacctcgtgatctgcccacctcggcctcccaaagtgctgggattacaggcgtgagccactgcgcccggcctagacttgaatttttaagaaaccactcttttatagaattcacttagtctttctttaaatatttccataagtataaagaaatataagtctttaacatgttttggcacagctttacttataatacggatactttttttgggcttccatagggaccagtgccacatgaacaactgcagtaaactaaattaaggattttgtttgacttttattgtcttggtattcacgaccaagtttctccaagcaattataagcatttttagaatcagacctttccataatatttctctgtaattcccagtgtttataacatagttattcccagtgtttataacatagttagataatttaactatggatttttttcccccaaaagtaataaatgcaggccagtcgtggtggctcttgcctgtaatcccagcactttggaaggctgagacaggtggatcacttgaggacatgagtttgagaccagcctggccaacgtggtgaaaccccatctctactaaaaatacaaaaattagccaggtgtggtggtgctcacctgtaatcctagctacttgggaggctgaggcatgagaattgcttgaacccaggaggcaaggttgcagtgagccaagatcatgccactgtactccagcttgggtgacgaagtgagaccctgtctcaaaaaaaatatgtgtatggtaatacattgctaattatagaaaatttaaaaaatgcagaaaagtacaaaaaaagaaaaaaatttccatgggcctaccacctgccaataccattgctaactttttttttaaatttaattttttttttaaagatgggatctcactatgttgcctaggctggatttgaactcctgggctcaagtgactgtcttttctcagcatcacgagtagctgggactacaaggaacacaccaccacacccaactattgttaactttttaattcattgttttcattttgtttttattataaggtgataaatatacagataagaagttgaaacagtttagagtgtaaagtagaaggaaaagttctcttgtccccattcggtattcttacttcccagaggtaactactgtttactgtctcttacctatccttctggaaattttcattgcagatgagtatataggttctgcagttgaatgtacatagcattcttcagctttttttgttttttaacctcaatgatctattttcctgtcaggtcatctgagtctaaaccaagcttgtccagcctgtggcatgtgagctgcatgtggcccaagacggctttgaatgtggcccaacacaaatttgtaaactttcttaaaacattatgagatttgtcagctatcattagtgttagtgtattttttttattttatttttattttttgagacagtctcgctgtgtcgcccaggctggagtgcagtggcgcgatctcagctcactgcaacccctgcctcctgggttcaagcgattctcctgtcagcctcccaagtagctgggattacaggcgcccatcaccacgcctggctaattttttgtatttttagtagagacagggtttcaccttgttagccaggatggtctcgatcaccttacttcatgatccgcctgccttggccttgcaaagtgctgagattacaggcatgagcgcctggccagtgttaatgtattttatgcatggcccgagataattcttcttccactgtggcccagggtagccaaaaggttggacaccctggtctataccattcttttgaatggctgcagagtattctgttatataagcatacataatttaaacagttttatattgatgatattcaggatatttttcttttcactattacaaacagtgctacaatgaacatctttgtaggtttttttttttttttttttgagatggagtctcacactgttgctcaggctggagtgcagtggcgccctctctgctcactgcaacctctgcctcctgggttcaagcaattatcctgcctcagcctcttgagtagctgggattacaggtgcctgccaccatgcctggctaatttttttttttttttttttttgtatttttagtagagaagggggtttcactatgttggccaggctggtgttgaactcctgaccttgtgatctgccctcctcggccccccagagtgctgggattacaggcgtgagccaccacgtccagcctgtagatggtttttaaacatttgtttttatttttgagacagggtcttgcattgtcacccaggctggagtgcagtagtacgatcgtggctcactgcatcctcaaactcctgggctcaatctgtcctcccatctcagtctcctgagtagctgggactacaagtgcatgccaccatgcctgactaatttttctactttttgtaggatggaattgccctattttgcccaggctggtcttgaacttctggactcaagtgatctgcccaccttggcctcccaaaatgctaggattacaggtgtgagccactgcacctgaccagtttttttattattaatttttttctttccaacttttaagttcaaggggtacatatgcaggtttgttacatgggtaaattgcatattgccatattgcaggggtttcatatacagataattttgtcacccaggtaatcagcataatacccaaataggtagttttcagtccttaccctcctcccactccatagatggtttttgttatatgtttggagatctccaattagctttccacctggactttatgtgtaattttctcattgctgttttctttggcatataattatactcagttggaccaaatgcctcggtgtctcagatcaacatcctcaattagaggcagatccttcagcagcaggtaatatttttctatgcctgttgaaaagaccaaagactctgctcttgtaagtaagtttgacctgtgatttccatgtacttttctttcttatttgtattttattttccatatgaacatgtattacttgctttttttttttttttttgatacagggtctcactctgttgcccaggctggggtgcagtggcatgatcacggctcactgcagtcttgacctccctgggctcaggtgatgctctcaccttagactcctgagtagctggaactacaggctttcttgtagagacagggttttgctatgtttcccagggtggtcttgaactcctgggctcaagcaatctgcctgtctcagtctcctaaagtgttgggattaacaggtgtgagccactgtgcccgactgcatttttaaaacagaacaaaacaatgtcactggtgaatggtaacaggaccaagttgatttatattatgatttgccctttaaaaaactcgttactggacaggtgaggtggctcatgcctgtaatcccagtactttgggaggctgaggcaagagaatcacttgcatccaggagtttgagaccagcctgggcaacatagcaagaccccattcctactaaaaaaatatttaaaaattagctgtgcgtgttgacgcatgccggtagtctcagctacttgggaggcgaggcaggaggatggcttgagtccaagagattgagggtgtagtgagccatgttcatgccactgcattctagcctgggtaacagagccatctcaaaaagttcatggcttatcattaatcatccatctaactagacacgttgattgtgcattgattctactctagggaaagtccaaaaatatatttcggtttacagccattgtggaaagtaggaatggtaatgatattagagttttcagacataggtataggttggtcagatacttctcatctccttcccccatcctgccaccccctgctgaatgttattgtcatctgcctcagctaactcctttttgctgggcttccatcgatcgtggttctagtagtccctgcccttagagcagagctgtggctgtgttcctttcacttagggcctcaggaagttgattgtgctttgtgtgagccaggcagtgatgggggaaaggaccaatttgctctgctatgctattgttataaactgttctgttccttataagtagcgtattctgtaatttagtttctaaaaatggggtttctgaaagttgggctctttaggccaataagcttaatttttatcctatttacctgtgctgtgtatttcagactttgagtttgtttaaagtttgggctgtgtatcattagtaaatatttgttggatactttctctgtgcatgtttatgacacaaatctgtattgtagataagaggccacggaatctagataggttttaaaatgtctgttatacagtgttcttatataaactcaaataatccattaggattattaggtctgatttggaataagcagaataaattaagttcttccttgagtagggaaataactgcactgtcttgttttaacatttattttcacattgttattattactgttttttttttgttttgtttttgagatggagtctcgttctgttgcccaggttggagtgcagtggtgcaatctcagcttactgcaacctctgcctcccaggttcaagcgattctcctgactcagtctcctgagtagctgggactacaggtgtccaccaccacgcctagctaatttttgtatttttagtagagatggggtttcaccatgttggccaggctggtctctaactcctgacctcaagtgatctgcccactgcggcctcccaaagtgttgggattacagatgtgagccaccacgcccagccttattttatgattagttttttgagactggatcttgctctgttgcccaggctggagtgcaatggtgcgaacatggctctctgcagcctcgacctcctgggatcaagtgatatgctcatttcagccttctgagtacctgggactacaggtgtgaactaccatgcttggctaattaaaaaaaaattttttttagagatggggtcttgctatgttgcccaggctggtcttgaactcttgggctcaagcaatccttctgcctcagcctcctaaaatgctgggattatagtcatgagccactgtgcatttaaagcaagagtctttgagtttgggggtattttatatataccttctctttttttttgagacaggttcttattctgttgcttaggctagagtgccatggtgctaatcagggctcactgcagcctcaatcttgccaagctcaggtgattcttccacctcagcctcctgagtagctgggactgtatgcttgtgcaaccatacatggctaatttttgtattttttgtagagacagggttttgtcactttacccaggctaatcttcaacctgtggagtcaagtggtctgcccgcctcagcctcccaaagtgctgggattacaggcatgaaccactgtgcctggctcctttttttttgagatggagtctcattcttttaccccggctggaatgcagtggctcaatcttggcccactgtaacctccatctcccaggttcaagagattctcctgcctcagcctcccaagtaggtgggactacaggtgcccgccaccacgcccagctaatttttgtattttcagtagagacagggtttcaccatgttggccaggctggtctcaaactcctgacctcaggtgacccacccgccttggcctcccaaagtgctgggattacaggtgtgagccaccatgcctggtctsaagtatagttttttaaagaaagaagtctcactctgttgcccagactggagtgcagtgatgtgatcatagctcactgtagcctcaaactcctgggctcaagagatcctcccgtctccgtctcctaagtagttgggactacaagcatgtgccaccacacctggctaatttttgaaaatttttttgtagagatgggtctccctatgttgcccaggctggtgtcgaactcctggcttcaagcagtccttctctctgggactcccaaagttctgaggtgacatgcatgagccactgttccctaccccaggctagtttattttgattaacatgtttgtcagattcttccacttgatgtgtgtggcagttagttcattgattttcgttgctatgtagtatcttgttagatgcatatactrttgtttatttatttaatgtatttcttaatctcatgacagtgtagattagattatgtggggagaaattggaggcacttgaattatagcaggagtgatttagattaaacataaattaaaatttcttgatgaaatttgaactgccacagaaaagctgtgaaatttatttttctatggctcttcaaaaataagccctatttccttcatttaaaattttatttattaatttttttttgtagagatggggtctcactatgctgtccaggcaggtctcaggtctcaaactcctgggctcaaggcctcctcctgcctccgcctcccaaagtgctgagattacaggtgtgagctaccatgcctggcccctttgttttttttttttaaattgatatgtcatagatgtatgtgttttggggatatgtgtcatatttagataaattcatataatgtgttaatgatcaattcagggcaattaggatatctgtcacctcaaacatctttcatactgggaacactggaattctcttctggctatttggaaatctacaatagattttcattaactgtaatcatcttactgaactatcgaatactagatcttattccatttatccaactgtatttttgtactctttaatcaacctttcttaatcctccctctcctgtttcctttcatatactatattaggtgtaactgctctggatgaggaaggttagataaccagctttgcatttcctgttttgttgcagtcttttctttgattactgggaaatggaataaaaatgtaagcatatggttaaaatgttgtgttcacctttataaagtacattaaaaaattcttttgttatctttagtaaaaatgaaatgtactttctcaagtgtgatgtccagaaataattatccactgggtgtgtgagaaaggccaatagaatcaaaggaaaaagaatcatgaaatcttttttttttgtgctgatgaatcctttggtgataaaatatgtggtaaaaatgtgacaggaggaagtttgtgctaaggtgtaaggtctatttttatcctgtaagtagggagaagcaattcttagtcattaggaaatataggtttccaaaaagaagagtgttgttttcctgctgctgcttggttctctcttttgctatagtaagtgcttctttagagctgtagaagacaggcctgtggattgtgttgggctgtcaattttctcttgcaactgtttgctttattgatttctatagcgtttcattgtaaatgatgttgagaagaggttagagggcagggagggagatctgcctagcaaccaataaggggctggcagttggacagtgggaagataattgcttttatataattagagttggggcaaagatgattcgaaaggctagattacttacatgagccaaattagttatgaagcaaattttagagactttgtctgcaaaaggatagaggaaatctgcttgccaaggaaaggggggtaaatgatagatataaacctgtatgtctacctcacttcagccctccattcccacaattacaccagagagcatgtcactctttggaatggtgctctccttttgtaatcttaatcttcataatctatctttttttttttttttggggacagagtctcactttgtagctcaggctggagtgcggtggtgctatctcggctcactgaaacctccacctccctggttcaagcgattcttgtgcctcagcctcgtgagtagttgggattacaggccctcaccaccatgcccggctaatttttttatttttggtagagatggggtttcaccgtgttgcccaggctggtctcaaactcttgagctcatgtaatccgcccgcctcagcctcccaaagtgttaggattacaggcgtgagccactgtgcctggccagaatctatctgattgtattctttagcccatttttacagcttatactcttgctatgctttaaccactgtgatataaggtagatgttaaaagctttggttttagacagacatggcttggtgaatatatcagctccaacgctgtgagttgtctgcctttccatatgttacctcatctcattaaaccttaatttccacatctttaaaattcatatatttgttagggtagtagtaccagtgatggtgaaaatacctatagcaaagtattgctgacataattgttgtgaaagtgattagtactgtcccaggcatagaatgagtacttattttaatataaaaacagtattaatattcttcatccagctttatgatatctattcatctaagacagggagctgaaagtcttcctagacctctctctctctctcctttttttgagacagaatctcaccttttttgagatagtctcactctgtttcccaggctggagtgcagtgatttgatcccagctcactgcagcctcaacttccagggctcaggtgattctcctaccttagcctcctgagtagctggaactacaggtgtgtgccaccacacccagctaattttttttttttttgtcggggggcagggtctccctctgtcctccaggctgtagtgcagagtgcgatctcggctcactgcaacctctgcctcctgggttcaagcgattctcttgcctcagactcccaagtaactgggactacaggtgtgcgccaccatgcttggctaatttcttgtatttttagtagagatggggttttgccgtgctggccaggctagtcttgaactcctttttttttttttgagacagagtctcactctgttgcccaggctggagtgcagtggcacgatcttggctcactgcaagctctgcgtcccgggttcacgccattcttctgcctcagcctcccgagtagctgggactacaggcgcccgccaccacgcctggctaattttttttgtacttttagtagagacggggttccactgtgttagccaggatagtctcaatctcctggttccaccgtgttagccaggatagtctcaatctcctgacctcgtgatctgcctgcctcagcctcccaaagtgctgggattacaggcgtgagccaccgcgcccggccaggtcttgaactcctgaccttaggtgatccacacgcctcagcctcccaaagtgctgggattacaggcatgagccaccgtgccccgccatttgtgtagagacaaggttttgccatgtggctgaggcttgtctcgaactcctgggactcaagtgatctgtctgcttcagcctcccaaagtgctgggattacaggcgtgagcccctgtgtccagcctagacttctcagttgaggaagaaaatacaaagagagggaggaaagttgggttccgttgagtttgtgggatctgtgagataagttacatgtgagatatattgaattgaatgtatcagtctcattgcagatgatccttgaaaatggtaacccaaatgtaggtttgtagcttagtagagaaatctgttagagataaatatatggaagttgcaggtatttggtaataaagacattagcttgaattaaaatacttatggagggtcagaaaggagaaaaaggggctgatgctgccgccaaggaactccagtgtataggaatgggcagaagaggagttgatagatgtggtcagaactgtaggaaaatggagagtgttgtgttagggtctgtagcctagagtacagcgagtttcaagaaggaatgatcagatgatagaggtgaaggagacttgttgaggtttaggaaaaaatgaagagatcattggatttgaaaacaaggacagtttcatttgggtaatgtgagggcaggcagtgtattatagtagctgatgagtatttgggcagtaaagaagtggaatgagcaagtgtaggctacacattcagaagttctgcagtgaagagtagggttaagagtagtcttaaaggccaggcgtggtggctcacgcctgtaatcccagcactttgggaggccaaggtgggtggatcacttgaggtcaggagttcgagaccagtctggccaacatggtgaaaccccgtctctactaaaaatacaaaaaaaaaaaaaaattagccagacattgtgctgcatgcctataatcccacttatttgggaggccaaggcaggagaaatgcttgaacccagaaagcagaggttgcggtgagctgagatcacaccattgcactccagcctggttgacaaagtaagactctgtctcaaaaaaaaaaaaaaaaaaaagagtagtcttaagaagaaatttgagtattttgtagcttgaagggaaggaatctgtaagaaggggaaagtcaagatgagatggggaagggagagatgataactgatttcttttgtaaagtaggatgcaaaattatcagctgatagtgaggtggtggggatgatttagagagcttgaggagagtgcaaagggttcattcatttattctttcaacaactattgggccgggtgtggtggctcatgtctataatcccagcattttgggaggctgaggcgggtagatcacttgagatcaggagtttgagaccagcctggccaacatgacaaaaccccgtctctactaaaaataaaaaaattagctgggcgtggtggcaggcgcctgtaatcccagctactcgggactctgaggcatgagaatcgcttgaacccaggaggcagagattgcagtgacctgaaatcgcaccactgcactccagcctgggagacagagcaagagtttgtctcaaacaaacaaaccaacaaacaaaaacaaaaaaaccccacaactgttgtgctaggcacttggggaggaatggtgaggaaaaaacccctttccttcttggaagtttatatagactagtaggactacggaggagttagacattaaacaaggaagaatcatacaaattaatataaaattacgagtaggaaaaaatacaactgatttgtgctataaacgagagtacatgttattataagaacatgtgttaaggaaagttacctacacagatcagagaagtcctccctaatgaagtgaagactgaactgagatctagaagaagaggacactattgagagaaggagaagaatattctaggcagaggaaatagtatgtgcaaaggccttgcagtgggagaaggatctgagagaaggcaagtatagccaatattccaagagaaagggaaaatatggattaagatgaagctggggctcctgacctcaggtgatccacccgcctcggcctcccaaagtgctaggattacaggcatgagccacagcgcagcctggccaacatgacgaaaccccatctctatttaaaaaaaattaaaaaaaaattagtcgggcgtggtggccggtgcctataatcccagctactcaggatcctgctgagacaggagaatctcttcaacccaggggcggagatttcagtgagccaagagtgcgccatctcactccagcctgggtgaaagagcgaaactccatctcagagaaacaaaaaacaaaactatagggccttgtaggcaacataaggtggaaagttagcgagaataagaccgaggaaggggcagaagtatagaagtttataaactgaaagcactgggtttctactttgatttgtttgaatcctttttctaccagtgaaagcttttggcaagcctcttgactaccaagccacaattttaaaatggaagtgttaacatctgccccatgtaccttcataaagttgatgagaattacactcttaagatcatgtgtttgaaattctattgtataataacttttactctcagtcctttttatatcttgtttgtagagacttaactgttttgaaacttataaacaaacaggatatgatcagttccataaacatttattgagcacttaactatgggtgaggcattgaacttgtcaccctgggtatataaaaatgaggaagaagtgggccttgccctcaagaaattgagggcaaagaaagggtgacagccatgtgtacagctaagcatgatgcaagacacaaatggataatttctaaaacagaaaaaatataatggattgtagaaattccaactgagggacagggaagaactgtagaaaaagtcaagttttccattatggtgtcactcattaattgggatacgaagcatagaaagaaagaataacaacttctggggagatgatttgggtgttggatatgttgaatttgaagagttggcagtccacgtgttaaggttggaaatgttactcaggagatcagggttagagtagatttggtctgttctttgtggatctgttgtgtggaggcacggtgacagggtaaacatatactcagcatcatcattataatatactccatttcatccactataagatgccatagattgtaagaggcatcattattttatgtattatttgaaaaatactattgctgggcacagtggctcatgcctgtaatctcagcattattgggaggccaagacgggtagatcacttgagtccaggggttcaagactagtctgggcaacatggcaaaaccccatctctacaaaaattaggcatggtggcacatgcctgtagtccctaatacttgggaggctgaggtgggaggattgcttaaacccaggaggcggaggttgcagtgagctgagatccgccactgcactccagtctggaggacagagtgagaccctgtttcaaaaaaaaaaagaacaaacaaaaaaacacatacacacacacatacaattgattgctctatgacatgtcattgattgtaagattcatttcaatttcagagtggttacatatgagaaaataggccagtggctcacacatgtaatcccagcactttgggaggccgaggcgggtggatcacttgaggttaggagtttgagaccagcgtggccaacatggtgaaaccccgtctctgctaaaaatactaaaattaactgggtgtggtgcacgcctggattcccaactactctggaggctgaggcagaagaattgcttgaccttgggaggcggaggttgcagtgagctgagatcgcaccactgcactccagactgggtgacagagtgagacagcctcaaaaaaaaaaaaaaaaaaaaaaagacaatgtctcaccatcttagaatcaatgaaatactgaagctaacatttaatgagtctttactctttgccaataagtaggtaagggttaatcatttaattcttgtaataaccttgttatcctcattttacaaatgagggcactggcctactgaagtttgtccttttccatactgaaaagctgaatttactttttttgctttactcttaactatacaatacaataccaaattaattatacagggtagtgctttggaacatgaataaaatctatttttaataaaagtatttagggaaagatggctgttatgcattgttggctgtgaatcagagtctcactatagctgtggtttctgtttgcttaggatatattygtggacagcattatagcaggtgtttcatagactggagagttcattatggctctagtttaatattttcataaaaaataaaaggagtttaataaaatccctttttttcttgggagggagtgtggtataatggaaaatttgggattctagagaactcttgaatctcgctaggtagtgactaaaactgtatctataagtaagtttcttaacttcactaagaatcatcttctggccaggtgcagtggctcgcgcctgtaatcccagcactttggaaggctgaggcatgtgcatagcttgagcacaggattttgagaccagcctgggcaacgtgacaaaaccctatctctacaaaaaatataaaaattagctgggtgtggtggtgcatgcctgcagtcccagctttttggaaggctgaggtgggaggatcacttgagcctgggagattgaggctgcagtgagccatgatcacaccactgtgccctagcccagcctgggtgacagagtaagactctgtttcaaaaaagacaaaaaaatagagagagatgatactttagtggttttagttttaggtaaagttaaagcattaagttcagttaattgggtaacatcctaatttttctttacagttcactttagactgtaagagtcagttgcctaatgtaggaattaggtagatggatggctagaatgaccttgtcctgtgtgtgtataatcaaacttgggttatttctgataaacagtaaccatagaaatctgattgtgtattaatgtaaactctattccaactgaggtttatttatttagaaaacatttagaaagatacacttgaacacttgtacatgctcaattataaccttaactgtgtttactttataattagtcattggttttgttagttgaggtttgacgtaagtacttgtttgtcttttggtttgagagagaccttatagagagtaaattttattgatttttggagaaattaatttttttttcaaggacagggtagcatatttatatatatttcatctgtattctttttaagttgtgataagtcgctatgaagtaaagtggaagcctagcagtgatatctaagacttttgagaaatgtttgtgaatgaatgaaactaaagatatatggctgctttgcaagtttagttttgcttattattctatccataccatcagattttaatacaatttattcttttttttttacttgcttcatgtgagcataaattggagcattagctatttcagtcggtgtgaatttggtatcagtactgcagggagagggctgtggacttcaaaaattatgggcttttgaatctgtttcaattttatactgcattgtttaattaagtcagacttggggtacttagcctttctgagttttaatctgtaaattgtaaattacatactctacaacagtgttttttaaaattgtagcagtgtttgtttttgtttttgcttttgttcattagttctgaaatcarttaagtgggtgaccagcgttaggggaaaaagatacagagttttggccaggcagagtggtttacgcctgtaatcccagcactctgggaagccaaggtgggattgcttgaacccaggagttccagaccagcctagtaaacacagtgagaccctgtctttaaaaaaaaaaaaaaaaatgctggatctgtttcagcaggtacctgtagtcccaggtactcaggaggctgactgagatgggaggatcacttgagcctgggaagtgaaggctacactgaggcttgatcacacctctgcactccagcctgggcaacagaatgagacgctgtttcaaaaaacaaacaaaaaaacaaaaacaaaacaatggcatttctttccatattagtgtcctgagtttttctcttttattttcattcaaaaaattttctctagtgccttgatagggacccttatttttcttatttcacagatgtaactaattttaaaatcctttatctttgtttttctatgtttcatgattttaagcaagtctcttagagcaagttgttggattctgttttctaaaaaaaattcagtgaatgtcttttggtattgctgtgtctcagtgatctagaagctgtgttttattgacatatagtaactgagatatgacctgaaatttatttaatctatttctcatgtttctcacctataaaatggagataatattagtacctatacggtactaattataggcatgagccaccattcctggcctggacaactttttatatcaatgaagatcgatctggccaggtgcggtggctcatgcctgtaataccggcactttgggaggccggagtgggtggaccactcgaggtcaggagtttgagaccagcctggccaacatggtgaaaccctgtctttactaaaaatataaaaattagcctggcatggtggtgcgggcctgtagttccagctactcgggaggctgaggcagtagaattgcttgaacccaggaggtggaggttgcagtgaggccagatcagccactgcacttcagcgtgggtgacagagactctgtctcaaaaaaacaaataaataaatacataaaaaataaaaattaagatagatctgcccaccaaactatccttgaaaaaccctaaattctgagtctttggagagattgatttgagtaataactccatctcctgtgtggatggctggacctgcatcagttaaactctttactgcagtgccatggtcttggtgaactggttttgtttgtgcagtgggcaggaagaagctgtggagtgattataggattaccagccctactggactttatttttgaatactacttcttttacatttgttcctatatcatcttcagtaactccaatatctgtgtgttagagctctttatatcttcctacttctcacctttaaaaattataaaaccatcagttttcttgaaagttgactcctctattgctgcttctagtgcatttttatactttttctcatgtttaacttaatattctttctcattgagcttccttttgatttttatctgcctctcagcagtcttcctcagtcttctgcttttcatcttttgcttctgtgaccccccctttttaaaatttagaaactgtgaaaccaatgctgattaaaatttatttttttaacacaaaattttattttattttatttttatttatttttatttttattttttttagtatttattgatcattcttgggtgtttctcagagagggggatgtggcagggtcatagggtaatagtggagagaaggtcagcagataaacacgtgaacaaaggtctctggttttcctaggcagaggtccctgtggccttctgtagtgtttgtgtccctgggtacttgagattagggagtggtgatgactcttaacgagcatgctgccttcaagcatctgtttaacaaagcacatcttgcaccgcccttaatccatttaactctgagttgacacagcacatgtttcagagagcactgggttgggggtaaggttatagattaacagcatcccaaggcagaataatttttcttagtacagaacaaaatggagtctcctatgtctacttctttctacacagacacagtaacaatctgatctctctttcttttccccacatttcccccttttcttttcgacaaaaccgccatcgtcatcatggcccgttcttgatggtcgctgtctcttcagagctgttgggtacacttcccagatggggcggcctggcagaggcgctcctcacttcccagatggggcggccgggcagaggcgctcctcacctcccagacggggcggcctggcagaggcgctcctcacctcccagacggggtggccgggcagaggcgctccccacctcccagatggggcggccgggcagaggtgctcctcacctcccagacgatgggcggtcgggcagaggcgctccccacctcccagacgaagggcggccgggcagaggagcccctcacctcccaggcggggcggccgggcagaggcgcccctcacctcccaggcggggcggccgggcagaggcgcccctcacctcccaggcggggcggccgggcagaggcgctcctcacctcccagacggggcggccgggcagaggctcccccaacctcccagaggaagggcggccgggcagaggagcccctcacctcccaggcagggcggccgggcagaggcgctcctcacctcccagacggggcggccgggcagaggctcccccaacctcccagatgaagggcggccaggcagaggcgcccctcacctcccaggcagggcggctgggcagaggcgctcctcacctcccagacggggcggccgggcagaggcactcctcacatcccagacgatgggcggccgggcagaggcgctcctcacttcccagacggggcagctgggcagaggcgctcctcacttcccagacggggcagccgggcagaggcgctcctcacatcccagacgatgggcggccaggcagaggcgctcctcacatcccagacgatgggcggccgggcagaggcgctcctcgcctcccagacggggcggccgggcagaggcgctccttgcctcccagacggggtggtggccgggcagagacgctcctcgcctccaagacggggtggcggcagggcataggtgctcctcaccacccagacggggcggcggggcagaggcgctcctcacctcccagacggggcagccaggcagaggcgctcctcacttcccggacgtgkcggtcaggcagaggcgctcctcacatcccagacgatgggcggccgagcagaggcactcctcacatcccagacgatgggcagccaggcagwgacactcctcacttcgcagacagggtggcggccwggcagaggcgcccctcacttcccagacagggcggccgggcagaggcgctcctcacttcccagacggggcggctgggcagagggcctccccacatcccagacgatgggcggccaggcagagacgctgcccacttcccagacggggtggtggccgggcagaggctgtaatcttagcactttgggaggccaaggcaggcggctggaaggtggaggttgtggcgagccgagatcaagccactgcactccagcctgggcaacactgagcattgagtgagcgagactccgtctgcaatcccagcaccccgggaggccgaggcgggcagatcactcgaggtcaggagtgggagaccagcccggtcaacagggcgaaaccccgtctcctccaaacatacaaaaaccagtcaggcgtggcagcgcacgcctgcaatcccaggcactcggcaggctgaggcaggagaaccacgggagcccggggcagggaggctacagggagccaagaccaccgcagtacagtccagcctcgacaacagagggagactgaagaaagaaagaaagaaaggggagagagggagacgaaagaaagaaagaaagaaaggaaggaaggaaggaaggagaaagaaagagaaagaagcgggggggggagagagagagagagagaggagaaagaaagaaagaaaagaaagaaaggggagagggagagagcacaaaattttaaaaatgtttctttacctttgagtcctatgttcttacattgttttataatcttttttcttggtcttcaaaacaataaaatattttttcctcccaagaataatgagatattcattcgtatgggggttcccttcctcccacctcaaacatattgagtattcttagatgatctcactttctgtttcctattagaagcctcctcttagattttatttatttacttttcctaaggtacttttgttatagcaagaaggctcctcttggattttaacaaaaagggctcagattgccagttaagtgcctcaggacagtgaggaggaagtcctggctacaaatcacccttttagagaaacttctctttgtggaggatattatttgtagttggctaagatgctatgtcaagttaagatctggtgtggccacattgttgccttgcactagaatagtcctgcttcctcctagagtatatgtcagctctgtgtagcttcctttggtacactagaaaatggtctgccactagtacaaccaactactatgtcctatgtcttgcaggacagttctcaaattctgccaagttgttctctgggtgctgcacctcattgcatccaaagagaatccccctgatttatttagcaagaatgttcttccaaccccgagcttcactytgggctcttgctacagcttttctcaaatcccgctagtttgcagctgttaaaagaactctctataatccgaaaataaaattctaggctgggcatgctggctcatgcctgtaatcccagcactttgggaggccgaggtgggcggatcacttgaggccaggagttcgagaccagtctggcctaacatgatgaaaccccatctctattaaaatacaaaaaaaaaaaaaatggtggcacatgtctgtattcccagatacttgggaggctgaggagggaggatttcttgagctctagatgtagagactgcagtgagccgagatcatgccactgcagtccagcctgggcgacagagcgagactctacctcaaaaaaagaaaaaagaaaaaaaaaaaacaacacagtaaaataaaactctaagccctccagctggctgaatggacctccccccttggccaagggaaacccaaagaaacctgaaaaactacttcagggcataaggagaaggggcatctgatatgcctcatcatacagtgttccctttggagtttagacacaactgaccagcattaacattaaaacagagatgttaagactgacaaaacatgactcttcatagcaccctactaggtgtagaccctactagatctgacatctcttaaggtctgataagagacattcaccacctattctctctgaagcctgctacctggaggtttcatctacatgatgaaaatcttggctttcacggctcccttatctaaactcaagcattttctttatgctgaattcaactcttcaggcagggcttaacttccaaccatttggcaaccaggaaatctttcaatccacttatgacctggaaggtcctcccacccgctgtcccactttgagatgttgaagaatctgtgttgtctgcggtaaatacctggggtttgtcatcttgcaccaggaaaatttaggacacagatacacatgaggagtttaggagcagaatttaataggcaaaagaaagagaaacaaagagaaaggaaaacagttctctctctagtgagagagaggggacttccaagaggaaaaagctgactggtggcagatgtgtcagattttatagtcagtcttgagaaggcggtgtctgatttacatagggctcacagattggttcaatcaagtatgatgtttacatagcacatggggaaggctggccacctcaccctaatcttattatgcaaatgaactttccccttgtctggtgccatcttgtctgctccttactgtacatgtggctggcagagaaaggaacaccgcgcccggccacgagatgcttccttatataaaaatttcttccctttataaccttctttgtatagccagggtgtgacatattaccaaacccaataagaagttcttgcagactcagtgatagtaaaactatcatgcttccttttcgttgggaaccattatctctgctattaggataataattaagcaaaatactacagcaatggaaattctctgtccgatattccggttagaaggtgctaccatctataggtcttactgcaaatagtaaagtgagtatagcaattcctgcaagtgtggtacagtagataatttccatgtaaaattttacttgccaagatatagaatctccctttggggatctatgaagtttcttggttttattttcccaaacagaaacatctgggttatgggcaccctattcactttcattacctggcagatgttgcaggataattgcccagaactagcatattgatccagctttttayattgcccattcctttytgtttcttccaggcttcaggagatcaccacttgattcacaggaataagcgggattagtctaaaatgtagtcaaaaaaacttaaaaacaatcattgagactagaatttagtgacaaatggatgataagctttggagcataatttttctctctccagtctttattttaggtaaaaacaaattatgataggattgtgttgtttgtataataaactttagtcttatacttggcctgattatttgcataaggtgcagaaagaatgatttctacataggccttttgaattggctttgatggaactctgatccacaaggaattttagataaaacctcttagagctgaacccagccatgggtttatatcctcaaatacctgtgagttgggtgatcccctcctcttaaggtcccaagataaacttggagctcctggatctgttagaaagtggcattctttactgactacaggtcagaaaccctggacggggactgtgtaggtaagggtatgaggccagttcttctcatggggcttttattggctctgcaagtctagattgactccttaaatagtttccaaattctagaggaactaggcagagagaaacaaacatactccaaattttgttcacaagagtataacttactcaattattaaaggccataagtagttcaaaataagtttcattgactctgaaaaacaaaacaaggatcagcaatattccaagcaaaagtcagaaagtttgctttagctttgtgagtgcagcccatttagttaactcttattttgcttgatatacatgagcattttagttcttcatagtcctgtactttttttctttattccgtgttacaatctttaaagctattaaaaaaactcacatttgagaacacctgttaaagtcctgtagcttgattataaaccatcttttgagaaagaacaaagcaagacaacaattgtctgcgaatgacaaaatttccaaggtagttatagttaaaagcaagactgacaaataagtttagttatctctgtgatttacaataactttaaccttaattataattgatagcatatacttagacattagaattttagaagtcacatgcaattttggaacatatattagtattcaccaaaatataacttaaagaatatcggacatcattttggcaatcttatgtgacaaaacatgccaaataatmctgtgtacctcttctctggatttttcaggggcctctgaaccatccagaaagccaggcatcaggaaagacaattttgaaacttgaagtttgattttgggacacctgttaaatgtcagaggtttaaaatacttgatgttatgaaatagaatttcagatcgccataaattgcttattttgccaaaatgactcaaaaggcaaaaaccttctattaacctttactattacatgaaaatcctattcaaagtcaaaatttacccttgcattagttwattaatgttagccccagtttgttgaaatgaaaccttatagatgattccatctaattttaaccaatttgaccatgaggtgcaatctttacaaaccttttataaccctttttactaaagggcagattagcatctttagacaaccttgctatacttttatttcaatactcaatttatgagaagaccgtataatgcccttttggatttaatgtttacacattgtttgcaagattaatttttacaatctttctgtaacttgcttaaacctctagctttatcttatcaaatttaagataatccctcatacctgggcaaaatttacatttccatgcattcttataatcttttactaaaaaacgcattttactgtttttatacgccttgcatgtaaaactgtttagtgacctcaaatacatgtggcactgttaactcttagcaacttttacttttggtgaaaaacctgtttagtaagtgtttttaattatgtaccaggtgtggagcctaggacccagacagaagtgcagataaggtctgaccctcttcagcatctaactttcacgtgtcccaggccttacctatctgtaaagcaggcaatttggaacatttagcaaacctagtatctaagctgtatgatttagaccacctatttgcattttgacgacacttgcattttaccaattcttcagactatttttatttcttaaagattacagtcatgtgaactaaaaaatatttaagtgcttatttttctttaacccaattagagctctttttatagacattacacacaacacacatatagcaacacaaatagaagattcagcacttgtaacatttttcatttgccagtttctttttttctgttttttgagacagagtttcactcttgttgtccaggctggagtgcaaaggcgtgatccyggctcaccgcaacctccgcctcccaggttcaagcgattctcctgcctcagcctcctgagtagctgggattacaagcatgcaccaccacacccggataattttttatatttttagtagagatggggtttttccatgttggtcaggatggtcttgagctcccaacctcaggtgatccgcccacctcggcctcccaaagtgctgagattacagacgtgagccaccatgcccgacctgccagtttcttaattggattactcgtttcaggatggagcccttggaggaacagggccaggatagcatgccttttagggcctaagaagcaggcacagctgaaggcaaagaaagatccgcaaaattaacggcgccattttatactggatcttggatcccccaaaggtgggagatactgtggaagaagagagtgcagtgcttctactgtgcatttcatttcaaggcaacccaaagccaattggcttattttgtaatcggcccatccctcatgggagtcttatctctcaatagggggtggggatgtttccatatcttataggtggccaagagcatgcttctctgactcaaatgtgcagagttaagtatccctccataactactattagccattccttaaagtatatttcctacctagttattacacaccaaagctctctcataatgtgaagtaatttgatatccccaaaactcaaaactatcagataacacaatgcaaaacagaactgagcctttgattttgagagggaatgatctgcttttaattcctggggtttcatgaggaaaacagtttttttttcttccccccctcccccaaaacagggtctgtagtgcctcctctgtttttcccaaggagtccccggctaccggaagttatcttagggcctgtcatatgtgcattaagagtggcaagacaaaaaatggagaaaaataattcagtcgactaaaaagaaaaaagactttttccagaaaaacatgatccaagaagagaaaaacataatagccttttaagtatatctataactgggatatccacttttaattaagctgagcactctttcagaaaatccttttaaatcccttgttactaaactttagccacaccaagcagttaagattttcagcttttgaatgtcacaaaaagtaacctcacaggtgagaccaacaagccttaattagtttatgacttaacctccagtgtacaaggtattttcttttttctttttttttgagacagagtctcgctctgtcgcccaggctggagtgcagtggcgccatctcagctcaccgcaactcccatctcccgggttccaatgattctcctgcctcagcctcccaaatacctgggattacaggtgccagccaccacacccagctaatttttgtagttttagtacagatggggtttcaccatgttggtcaggctggtctcaaactcctgacctcaggtgatctctgcctcccaaagtgcagggattacaagcgtgagccaccgtgccctgccaggtatcaggtattttcaaaggggtgataagtaacttttgaaactctcattgcaaaattgtgactgagacagtgaaagagatcagacccaaccaactccattttgtttttagcccctaagctgtccttgctcatcactgggcataggctgaaccaactttgggaggtgtctggtttacagtgtatagtctaaaacaaaggtggtaacagccccttcctaagatatacttccctcttgcctggggaccagaccaagaaactagccacaaaatgagaaaccatggcttaggagtcacgcagctggaggctacaagattttatcctcccttaactgcccaagatcagtatttaagatattttgtaaactctgcccttgatggatcagctggctctgcctagattgataaactggcttatctgatttttggcccttccccgggaactaacttagcacaagacacccacygttgtaaaatggcagagactaaaacaaagtaytgccacgtggttacacgtcatgtttccaagtacatgaaacaagatggaggcctgtagccaagtttgttactgaccattttgttggactggcttgaacagcaggcttatagggtcctgggtctgcatcttaacctaaggtaccctttctttccacaggaccatacagaaagatacacgaagcacaccagattggctacagtttaagaccaacctcacaaatcccttttcattaattaaaacttaaccacaaatataaacaataatccttatcccttttgccagtttggatagggagagagaagccaaaagcctgactggtaagaaaattttacccttttgcccacatgtcaggcttctagttccttttccccagctcaactctaagccaagcatttttaaggtttggaaaattaacttttcccaggttgaaagaacattataaaagcatataggagccattttaagctgtaaaagaaggaaaaataccatagaaaagtctgggggttccagttagagttgttaagaggtattgcttcccttcctatcgacaatgatgtttcctctatttcttgatcttctctattttctcttttccctttttgcttattataggagacatattgtacatttccaaaattctctgccttctgcagaactgcctgtttttcagctgtagtttggggtttggcttagaagcagcataacatcccttcatgagaggttaaacacctgagttaaatttcagaaagcttctatatacctatcagggtcattggagaattggcctaagtctccctttatttgcctaaggtactgtaatgagaagggaacttgaggggcccctgaataagggggatccttagattgttcccctggaagttacttctctaactttggtgaatcatttgctattggcctgcctgatatgactactaaaagagctgggttgattttgtaacacctgcaaaggtctagtaaggccatgcccttgtgcaaaagaaaatgagttgatttttctttaaattattagagtcaaaggagtccttgtgcttcagaatgtactccagaggggtgcaagctgaagatgatctgttacccatctagagagagaagtgacaaaaaggcatctcttttttcaccttccttttggtgtgacccagggtggagaggaaaacagtggggacgtccctcctgctgttttccctctgcggtttctgggtcctggcaccttgtttaatgtgccacccatggttgcaggtgtgacccccagccatggaaccagaggaactaagtgattgggattagtcacactgattcatgcaactcaagtcctctgcctgtgatttcctttgacttcctagacttgtgtgacctgcctggctccctgaaaaatggatcttgggagagactatgcgacagttgcatttgggcaattgttgcacttccctccttaatggaggaagtgtgctggtttgagctctatatcctgctattacagtccatgctaaagtgtttacccttagagaatggttctggttaacttctgaacttaaaatccccttactaattaagtaccattctgattggaggcagaataggtgccttaaaagatcataggggctgagtgtggtggctcatgcctgtaatcccagcactttggtaggccgagacaggtggatcatgaggtcaggagttcgagaccagcctgaccaacatggtgaaaccccgtctctactaaaaatacaaaaattagctgggcatggtggcatgtaatccacctgtgcctgtaatcccagctactcaggaggctgaggcaggagaatctcttgaacccaggaggtggaggttgcattgagccgagactgcacaattgcactccagcctgggtgacagagcaagactccgtctcaaaaaaaaaaaaaaaaaaaaaagattgtagggactaaatggctgttttcctgttgatggagcagtatcaagaataaaatttggttttgaaggatgttttattcctagttgttgaagccagaattttcccatttacagaagcagcatgaagcctggtttgtagtagagaggctcaaaaagggaagagaattgggaagctaggctgtttttggtaaaggactgacaatgtgcctcatgaagaggatccctgtttcactagatggtgctgttgaccttgaaatgccatgtgctttccagaccaagggcagagtgaccttgacacgccatgtgctctccagtcctaggtcagagagagacctggaaatgccacgtgctctccagaccaagggcagagtgacctggaagttccgtttgctctccagaccaagggcagggagagacctgcaaatgctatatactcttcagaccaagggcagagagtgatgctcactgtcggggggagccttctgtttctagaaaatctcaaagacgccttcccttgagctatatcccctacaacgtttcctgatcttgccaaacaaaataactgaactgtaaaacttcrctcacatagcatacacagagagaataggagatatgacagtcgcagacaggaaaggaggaaattatgatagaaaagttggagatcctgttgccaacaccccatcaggtggtcagagactgggatcagtccagaagcctttggataacacctgaaggtagccccagccagaaatcctcagttgctctagaacctcttacagccccgcacaatggctaagtcctccatgaaaggaagctggttcaaacatggccaacatgcccagcaacccatgggtgctgggggattctccattttcttcccagtaaatctcacatctgagtctttaagaatggcagccacgctaaccgtgtttttaactggctgacagatgcccattattgatttgatttagttctaaagtggaggccaacagccccaaaatgaaaggacagagttggattccactcctctactcaccgttttgatgagcgttgtaccttggtatcctgagtgagcaccctgacatgattggctatgttgtctggggtaaatacccagcgtctgtcatctcgtgccagaaaaatttaggacacggacacatacgaggagtttaggaatggaggtttaataggcaagagaaagagaaacaaaaagaaaggaaaacagctctctctctagtgtgagaggggaattctgagagcaaaaggtggactggcggcggatgtgccggattttatagtcttaaggaggcagtgtctgatttacatagggctcacaaattggttcaatcaggtgtgagctttacatagtactcagggaaggctggccaccccaccctaatctttttatgcaaatggaactttccccttggctgatgccatcttgtctgctccttactatacacatggctgacagagaagggaagatggagccactattttgaacatgattggcacacctgccagcatgtatgtctgcagcttgattttacaggctgctctttgttagaaaatgatttgggsctgcttcttattaaaaggaaaaccttaccaaggacttctgtacccttattatctgcctaagtgagttcttcttaactcctgtatcagtgtgccccctttccacgccaaaccaatgtatacttaacatgtatcaacttttgtctttgccttaaaatgtataaaaccagtctgtaacccaaaaaccttgggcacatgttctcaggacctcctgaggctgtgtcacargccatgggtccttaaccttggcaaaagtaacctctaaattgattgagatctgtctcagatacttttttgtttacatcctcatagctgttttgttaaatcttgtccctgattttagccttttttaccttatttctgattttagccttttccttccaagaaaagggtgttcataaggtctcaaataccctttttcataattctcagagggccatactggccctgaaaaatactttttaaagttagtcctgaggattctgttttaaaaagctagatctgtctgcacagacagaatattcagctttgttagagttgttttttttcctccccctccttcacaaacatcttgctagccagtcagaacagctgagtcaactgtggtcagttggctgagagatgtcacggtccatctttatgtccaaatatttgacaaatgtaaaaatatagctgaatatgcaaattaattattgtaaccatgctaatacacatacacatatacatgcatacatatatatacagggcagtgggattatatactattcctatcttttgttttttcatttctatcttttaaaatgttaagttttaaataagaaatggtggttattgtatttttgtttttcatgtctatcttttaaaatgttaagttttaaataagaaatggtggttattgtatttttgtttttcatgtctatcttttaaaatgttaagttttaaataagaaatggtggttattgtatttgggaggtgatacacctttttacttctagattctgaaatagatgggttacaaacaagggaactagtgccacaatgtttggaaattgttccatgcatagaactggctagaacaaggcaagttagccattccctgtgcctgaggaaccaggtcactggctgcagagtcagtgtgaataggattatttcccataatcccttgtagctttggttctatatcaaggtcagagagactcaggagcggaagttacatgtttttttgagggttaggtacagttcttatatattctcctatttctgcctttacttgtaaagatcttggggaggatgctctgcccaggcattttctctttatccctgacttccagggttttcatattggctggagttttataagaacctcagtgttttgtaatgaatatttcttttccacacatcttttctgtttttacatattgtagtagtaatatggatgaggcaggaattgtgtgctgaagtacctcccagctttgactctgaaaatactactttttaaaaatctatttatttatttattttctttttttgaggcatggtcttgctctgttgctcaggctggagtgcagtagtacgatcatggctgactgcatccttgacctcctaggctcaagcaatcctcccacctcagcctccagagaagctgagactgcaggcatgtgccaccatgcccagctaatttttaatttttttgtagagacaggatctccctatgttgcccaggctggtcttgagctcctgtgctcaagcattcctcctgcttcaatctcccaaaacgttgggatgacaggcttgacctactgaacctggcctaaatatttattttaaattagcttcataattagatgaatatcaagtttattcaatctggtattttttaacagtcttgaggaagtagttgatattgattgagcaatatagtgctttcttatttaaatatttaatgttttccttttttcttttttttgagacagagtctcgctctctcaccgaggctggggggcagtggtgtgatcttggcttactacagcctccgccttccaggttcaagcaatcctcccacctcagtctcctgagtagctgggactacaggtgtgtgcccccacacccggctagtttttgtatttttaggagagatggggtttcaccatgttggccaggctggtcttgaactcctggcctcaagtgatctgcctgcctcagcctcccaaagtgttgggattacaggccagagccactacacccagccatttttcaaaacccctgtttgttttaatatgtgatatgttttcagaacacctgcttattttaatatgtgatacggtttggatttgtgtccccactcaaatctcatgtcgaattgtattgtaatccctaacgttggaggaggggcctggtgggaggtgatgggccatgggggcggacttcccccttgctgttcttgtgacagtgagttcgttctcatgagatcttgttgtttaaatttgtagtacctctcccaccttctctccctcctgctccaaccgggtaagatgtgcctgcttcccctttgccttccgccatgatcctaagtttcctgaggcatcccttgccatgcttcctgtacagcctgtggaactgtgaaccaatgaaacctcttttttaaataaattacccagtctcagatagttctttatagcaatgtgagaacagactaatacaatatgcgaaccattaggagatatataaggatttaaaaactttaaaaaacatatctacacatctgtttaaatcttatcagttaaggtaataatgttaacaccccacttggtgtatatctttccatacttatcttcctattcataacatgtgttcaagcatattgataggatttggatctatgtctctaccaaatctcacgtcgaattgtaatccccagttttggaggtggagcctggtggtaggtgatggatcatgggagcggagttctcatgaataggtcagcaccatctgcttggtgcttttctcctgtgagtgagtaagttctcttgagatgtgatttttttaaggtgtgtggtatcttctccctctctctgttccttttgctctggccatgtaatatgcgcctgcttctccttggccttctgccatgatcatacgtttcctgaagcagatgctgtgatgcttcctgtacagcctacagaactgtgggctaattaaatattaaatctcttttctttatacagtatgtagtctcaggtatttctttatagcagtacgagaacagactaatacagaaaattggtatcaaggagtgaagcattgctataaagatacctgaaaatgtgaaagtgacttgggaactgggtaatgggcagaggttggacgagtgtggagggctcagaagaagatagaaggatgagggaaaaattggactgtcttagagacttgttaaattgttgtgaccaaaatgttgatagtgatatggacagtgaaggccaggctgaggagttttcagatggagatgaggaacttactgggaactggagcaaagtcagttttgttatgtgttagcaaagaggttggaggyattatgtctctgccctggggacctagggactgtttttattattattattatactttaagttctagggtacatgtgcacaacgtgcaggtttgttacatatgtatacatgtgccatgttggtgtgctgcgcccgttaactcatcatttacattacgtataactcctaatgctatccctccccgctccccctactgcacgacaggccccagtgtgtgatgttccccaccctgtgtccattcccacctatgagtgagaacatgcggtgtttggttttctgtcctcgggatagtttgctcagaatggtggtttccagcttcattcatgtccctacaaaggacatgaactcatccttttttatggcttcatagtattccacggtgtatatgtgccacattttcttaatccgatctatcactgatggacatttaggttggttgcaagtctttgctattgtgaatagtgctgcaataaacatacgtgtgcctgtgtctttatagcagcatgatttataatcctttgggtatatgccgagtaatgggatgactgagtcaaatggtatttctagttctagatccttgaggaatcgccacactgtcttccacaatggttgaactagtttacagtcccaccaacagtgtaaaagcattcctatttctccatatcctctccagcacctgttgtttcctgactttttaatgattgccattctaactggtgtgagatggtatgtcattgtggttttgatttgcatttctctgatggccagtgatgatgagcattttttcatgtgtctgttggctgcataaatgtcttttgagaagtgtctgttcatatcctttgcccattttttgatggggttgtttgattttttcttgtaaatttgtttaggttctttgtagattctggatattagccctttgtcagatgagtagattgcaaaaattttctcccattctgtaggttgcctgttcactctgatggtagtttcttttgctgtgcagaagctctttagtttaattagatcccatttgtcaattttggcttttgttgccattgcttttggtgttttagtcatgaagtccttgcccatgcctatgtcctgaatggtattgcctaggttttcttctagggtttttatgattttaggtctaacatgtaagtctttcatccatctcgaattaatttttgtataaggtgtaaggaagggatccagtttcagctttctacatatggctagccagttttcccagcaccatttattaaatagggaatccttttcccatttcttgtttttgtcaggtttgtcaaagatcagatggttgtagatgtgtggtattatttctgagggttctgttccattggtctatatctctgttttgataccagtaccatgctgttttggttattgtagccttgtagtatagtttgaagtcaggtagcatgatgcctccagctttgttcttttggcttaggattgtcttggcaatgcaggctcttttttggttccatatgaactttaaagtagttttttccaattctgtgaagaaagtcattggtagcttgatggggatggcattgaatctataaattaccttgggcagtatggccattttcacaatattcattcttcctatccatgagcatggaatgttcttccattgtttgtgtcctcttttattttgttgagcagtggtttgtagttctccttgaagaggtccttcacatcccttgtaagttggattcctaggtattttattctctttgaagcatttgtgaatgggagttctctcatgatttggcttactgtttgtctgttattggtgtataggaatgcttgtgatttttgcacattgattttgtatcctgagactttcctgaagttgcttatcagcttaaggagattttgggctgagatgatggggttttctagatatacaatcatgtcatttgcaaacagggacaatttgacatcctcttttcctaattgaataccctttatttctttctcttgcctgattgccctggccagaacttccaacactatgttgaataggagtggtgagagagggcatccctgtcttgtgccagttttcaaagggaaggcttccagtttttgcccattcagtatgatattggctgtgggtttgtcatagatagctcttattattttgagatatgtcccatcagtacctaatttattgagagtttttagcatgacgggctgttgaattttgtcgaaggccttttctgcatctattgagataatcatgtggtttttgtctttggttctgtttgtatgatggattacgtttattgatttgtgtatgttgaaccagtcttgcatcccagggatgaagcccacttgatcatggtggataagcttttagatgtgctgctggattcggtttgccagtattttattgaggatttttgcattgatgttcatcaggatattggtctaaaattctctgtttttgttgtgtctctgccaggctttggtatcaggatgatgctggcctcataaaatgagttagggaggattccctctttttctattgattggaatagtttcagaaggaatggtaccagcttctctttgtacctctggtagaattcagctgtgaatccatctggtcctggactttttttggttggtaggctattaattagtgcctcaatttcagagcctgttattggtctattcagggattcaacttcttcctggtttagtcttgggagagtgtatgtgtcgaggaatttatccttttcctctagattttctagtttatttgcatagaggtgtttatattattctctgatggtagtttgtatttctgtgggatcggtggtgatatcccctttatcattttttactgcgtctatttgattcttctctcttttcttctttattagtcttgctagcggtctatcaattttgttgatcttttcaaaaaaccagctcctggattcattgatttttttttgaagggttttttgtgtctctatctccttcagttctgctctgatcttagttatttcttgccttctgctagcttttgaatgtgtttgctcttgcttctctagttcttttcattgtgacgttagggtgtgaattttagatctttcctgctttctcttgtgggcatttagtgctataaatttccgtctacacattgctttaaatgtgtaccagagattctggtatgttgtgtctttgttccattggtttcaaagaacatttttatttttgccttcattttgttatgcatccagtagtcattcaggagcaggttgttgagtttccatgtagttgagcggttttgagtgagtttcttaatcctgagttctagtttgattgcactgtagtctgagagacagtttgttataatttctgttcttttacatttgctgaggagtgctttacttccaaacatgtggtcacttttggaataagtatgatgtggtgctgaaaataatgtatgttctgttgatttgaggtggagaattctgtagacgtctattaggtccgcttggtgcagagttcaattcttggtgagttcaattcctggatatccttgttaactttctgtctcattgagctgtctaacgttgacagtggggtgttaaagtctccccttattattgtgtaggagtctaagtctctttgtaggtctctaaggacttgctttatgaatctgggtgctcctgtattggatgcatatatatttaggatagttagctcttcttgttgaattgatccctttaccattatgtaatggccttctttgtctcttttgatctttgttggtttaaagtctgttttatcagagactaggattgcaacctttgcttttttttgttttccatttgcttggtagatcttcctccatccctttattttgagcctatatgtgtctctgcctgtcagatgggtctcctgaatacagcacactgatgggtcttgactttttttttttttttttgagacagagtctcgctctgtcacccagggtggagtgcagtggcgtgatctcagctcactgcaagctctgcctcccaggttcacgccattctcctgcctcakcctcctgagtagctgggacaacaggcgcctgccaacgtgcccggctaattttttgtatttttagtagagacgggttttcaccatgttagccaggatggtctcgatctcctgacctcgtgatccacccaccttggcctcccaaagtgctgggattacaggtgtgagccaccatgcccggccgggtcttgactcttatccaatttgccagtctgtgtcttttaattggaatatttagcccatttacatttaaggttaatattgttatgtgtgaatttggtcctgtcattatgatgttagctggttgttttgcttgttagttgatgcagtttcttcctagcatcgatggtctttacaatttggcatgtttttgcagtggctggtactggttgttcctttccatgtttagtgcttccttcaggagctcttataaggcaggcctggtggtgacaaaatctctcagcatttgtttgtctgtaaaggattttatttctccttcacttatgaagcttagtttggctggatatgaaattctgggttgaaaattcttttctttacgaatgttgaatattggccccccactctcttctggcttgtagagtttctgccaagagatctgctgttagtctgatgggcttccctttgagggtaacccgacctttctctctggctcccttaacattttttccttcatttcaacaggatctgtggaaatttgaacttgaaagtgatgatttagggtatgtggtggaagaaatttccaaccagcagagtattcaagatgtggcctggctgcttctaacagcctgcattcatatgcatgagcaaggaaatgacctgaaactggaacttatttaaaagggaagcagagcatgaaagtttgggaaatttgtagcctagccatgtggtagaaaagaaaaaccccattttcagtggaggaattcaatcaggctgcagaaatctgcctaagtaaagagcagccaagtgctaatttttcaagacaacgaggaaaagaccttgaaggcgtttcagagaactttgtggcagcctctcccatcacaggcccagaggcctaggaaggaagaatgattttcttggctaggcccagggccttgctgcactgcacagctccatgcatcctggagcactgctctgtgcatcctggcatctctagcaccagctgggctcagaagggcccaggtatagcttgggctgctgcttcagagagtgtaaactgtaagccttggtggtttacacttggtgttaagcctgtggatgcacagagtgcaggagttgaggcttgggagcctccatctagatttcagaggatgtatggaaaagcctggatgtccaggctgaagcctagtgcagggtttgagccctcatggagaacctctactagtgcagtgcagaggggaaatgtggggtgggagcccccccacagagtccacactggggcactgcctagtggagctgtgagaagagggccactgtctttgagaacctagaatggtagatccattggcaacttgcacactgtgcctggaaaagccacaggcactcaacgccagcctgtgagagcaactctgaaggctgaatcctggaaagatttggaactttccaaggccttgggagcccactccttgcatcagtgtgccctggatgtgagacatggagtcaaaggagattattttggagctttacgatttaatgactgcctactgggtttgggacttgcgtggggcctatgacccctttcttttgcccaatttctcctttcaaagtggagtatttacccaatgcctgtacccccattatatcttcaaagtagctaatgtgtttgattttacagtctcatagctggaaggggcttgccttgtctcagatgtcactttggattttggacctttgagttaatgctggaatgtgttaagactttggaggactgttgggaaggcatgattatattttgtagtgtgagaaggacatgagatttggagaggccaggggcagaatgatatggtttgcctctgtgcctcccacaaatctcatgttgaattgtaatccccagtgttggaggtggggcttaatgggaggtgatggataatggggtggagttctcatgaatgggttaacaccatcccttggtgctattcttgttatagttctcatgagatctggttatttaaaagtgtatagcacctcacccctcactcttttcctcctgctctggccatgtgaagtgctatatctcccttcaccttataccttgattgtaagcttcctgaggcttccccagccgtgcttcctgtatagcctgtggaactgtgagccaattaaacctcttttttaaataaatcaccacgtttcaggtatttatggcaatacaagaacagactaatacacacacacaaacacacacacatatatacatgcccttttggtttactttaaaaaaaatagctttattgaggtgtagtttgcataccatgcaattcatccctttaaagtataaatccagtggtttttaatgtattcacagagttgtgtaactgtcaccacaataaattttagaatattattatcactgtaagaaagaaacctcttagccattagcaatcatttccattttctccaacctcccactagggaggttcctccaactgggaaaccacgaatctactttctgtctttgtagaattactcattctggacattttatgtgaatggaataatataatatgtagtcttttgtagctgctttctttcacttaacatcatttttttaggttcatccaagttgtagtgtgtatcagtacattgttcctttttatgcctgaataatattccattatatgggtatactataatttgtttattcattcatcagttgatggacattgcattgtttccacttttggactgtaatgagtaatgctggtatgaacatttgtgtataaaattttgtgtggattttttaaaacttgaggtgaggctgggcacagtggctcatgcttgtaatctcagtactttgggaggctgaggtggatggattgcttgagcccaggagtttgagaccaggttgggcaacatgatgtaaccccatctctaaaaaaaatgcaaaaattagctgggcatagtggcacatgcctctagtcccagctacttggaggctgggaggtaggaggatcactaagcctgggaggcagaggttgtagtgagctgagattgtgccactccctctgttgtccaggctggagtgagcagcagagggagaccctgtctcaaaaataaaaattaaaaaaaattaaaaattgaggtgatagtcacataacatacaattaactatttgaaagtgtgcaattcagtggcttttagtatgttcacagtgtcatgcaattattgtgtctctctacttccaaaattttttcatcatcccaagaaaaatacccatacacattaaataatcactccctttccctctatcccctggtaaccactaatctgtcttctgtctctatggattttgcagttctggttatgtcatctaaaaggtatcatataatttatggtccttgtgactggcttttttaacttagcataattttttagggttcatccatatggtggtttgtatcagcatgtcattctttttaatgattgaataataccatagtgtaggccgggtgtggcacagtggctcacacctgtaatcccagcactttgggagaccaaggcaggtggatcacgaggtcaagagatcgagaccatcctggccaacatggtgaaatcccatctctactaaaagtgcaataattagctgggtgtggtgtcgcacacctgtagtcccagctactcgggaggctgaagcaggggaatcacttgaactgaggaggcggagtttgcagtgagctgagatcgcgccactgcactccagcctggtgacagagtgagactccatctcaaaaaaaaaaaaaaaaacacacacacaaaaactctagtgtatggatattaccacagtttgtttacccattcattagttcatggacatttgggttgtttctgctgtttggatgttatgtataatgctgctagatacacttgtgtacatgttcctgtgtggcatatttctgtgtgcactatttttcaaagtggctgtatcattgtggattcccaccagcagtatatgatggttccaccttttccacattcaagctcaaagttactattatctgtcttttaagtcatcctaatgggtgtgaaatgatatcttactgtggttttgatttacatttccctaatgactagtggttgttatgcatattttcatgtatttattgaccatttatttatttttatttattttttgacatggagtcttattctgtaactcaggctggaatgcagtggttggatcatagctcactgcaaccttgaacttctgggctcaagcagtactcccactccagtctcctgagtagctgggactacaggtgtgcaccaccaccacgcttggctaattaaaaaaaaatatttttttctatgaactctgcagagaagaaattaatttttawttatttatttatttatttatttatttatttatttagtagagatggggatctccctgtgttacccasgctagtcacgaactcctgggcccaagtgatcctcccacctaggccacycaaagtgctgggcttacaggtgtaagccactatgcctggcctcattggccatttgtatatcttctttggggaaatatttattcagatcctttgcccatttaaaaattggattatttgtctttttattgaattgtatgtgttctttatgtatatgctagatacaaaactcttattagatatattacttgcaaacattgtctcccattctgtgcttttcgctttcttaatagtatcctttaaagtgcaaaagttttaattttgatgaagactaatttatctacatattttttctttggttgcttgtgctttgggcattatagctaagaaaccattgcaagagtttgtatactttcagctattatagtcagatctttgatacatttttaagttaatttttgtatgtcatgtgaggtttttggtttgcttttacaaaatgtattatgtatttttacttaaaatacatcttggatatctctatcagccagtagataactgtcatttttaagtctgtggataaaagagcgtgttactttgccaacttgtaaactccccttcctggaacgatacctctgcaagtctacctgccatccctgctgtttgttccttattctgtagaccctgttcaaagcagaactctagaccaattgctttcagatttgctttcccttttaataaggcacccatctaattttgagatgaaataatacccttcttggaacattcagtgactccttggaattcatataataaaatgcaattagggagggggcacaatctgaaatagatctgccctttcatactctttagactattactctgtattagtctgttctcgtactgctataaagaaatacctgagactgggtaatttataaagaagaggtttaattggctcacagttctgcaggctgtacaggaagcatggtggcacttctgcttctggggaagccccaggaaacctacaatcatggtggaaggcgaaagggaggcagagacatcttacatggcagaagcaagagcaagagtggggaggtgctacacacttttaaaacaaccagatttcataactcctcattcacttgccatcaccagaacagcacaaagaggatggtgctaaaggctaaagctttcatgagaactccacccccatgatccagtcacctcccaccaggccccacctccaacactggggattgcaattcaacatgagatttgggtggggacacaaatcgaaaccatatcactctgatagtttcaaggaatatttttgttgcttttcattgactttccaatttatgatccttactgactttactacttggaattctcttacaaaatctgtttttcactgtttatccaccttgcaattaataaaagtgtcctgtttcacaaaatgattaaaattatctataattttctcacttaacaatatgtctccctcacattatgctttcctttccactttgtttgtttgtttgtttgcttatttgagacagggtcttgctgtgtcacccagggtggagtacagtggcacaatcacggctcactgcagtctccgcctcacgrgttcaagcgattctcctgcttcagcctcctgagtagctgggattacaggcatataccaccgcaccggctaatttttgtatttttagtagagatggggttttaccatgttggccaggctagtcttgatctcctgacctcaagtgatctgcctgcctcagtctcccaaagtgctgggattagaggcatgagctaccacgcccagcctcccttccactttagttattattattatttttaaaatagagtcttgctctgtcacccaggctgaagtgcagtggcatgactttggctcactgcaacctccacctcccagattcaagcaattctcctgcctcagcctcctaagcagctggagttacaagtgcgcaccaccacacccagctaatttttgcatttttagtagagatggggtttcaacatgttggcccggctggtctcaaactcctgacctcaagtgatccgcccacctcggcctcccaaagtgctgggattttaggcatgggccacacgcccagccaaatgaggaatcttgagaaaacttggcaatgatatagttctatacattgctgctgtttttcattcccttttctacccccttcttttcccgacatcattcttcattctatttccattttacatgacaaattttgttacttatttaattattcccagactgacatttgagataacagtaagaaaaccttatttttagtgttatgtttcccttctagtggactaatactttccttaggtgccttacccttcttttaagcacacggcaataagaacagttttctcagccagtcatgttggctcatgcttgtaatctcaccactttgggaggccaaggtgggtggatcgcttgagcccaggagttcaagaccagcctggacaacaaaataatacccagttactaaaaaaaaaatttttttttccttctagaaagcatttaagttaccttatgcatttcaagaacaaataattcctaataaatgttttaaattgaccttattccatattttgagcgattgatttctatccatgcacacctgcttaccatttcctccactcaatttgtatatagcttcctgtccagtatagttttcactagctacatgtgggtatttaaatgtaaatttgttaaaattaaatgaatttaaaaattcattttctcagttacactaaccacatttcacatactcattagccacataaagctgatgggtactacagttgacagtgcagacacagaattccttcatcatcacagaaagttttatttactggcactgctacactgtttgacttattcctacttgcggggctgacatttgaaattattgtaaaccattccctgtttaataaacttatttttttttttttgagacagagtctcacttagtcacccaggctggagtgcagtggcacgatcttagctcactgcagcctccgcctcctgggttcaagcgagtctcattcctcagcctcccgagtagctgggactacaggcatgtgccaccatgcccggctaatttttgtatttttagtagagatggggtttcaccatgttggccaggctggtcttgaactcctgacctcaagtgatctgcccacaccgtcctcccaaagtgctgggattacaggtgtgagccactgcatctggcctataaacttatctttgatggactcttgttagtggtcattgttgcagaaatcttgcaatgccccatagaagtgttttgtatttttgtttgttttaaagagatgggggtctctctatgttgcttaggctgtactaactcctgggctcaatgaatcctcctgcctcagccttccaagtagctgggactacaggagtgcaatactgtgcttgggagaagttttaaaattgtttttggcagttttgtgtggcaaatataaaagtcattttaagctgaaatattttaagtcagcatcctatttatgttttaaacacataatatattcacatgataattttaagtaagaataaagaatatacggtgaaaagtaaatcttctcatgtcttcctctcagttgtccttggagagaggcatgtactaaaacaaggttctttgtgtgttcttctagattttttatcttataagcatatgtgtgcctgtcttcacttttgaaaatgtaagtggtagcatcctatgcatactttttatcgtgtgtgtgtgtgtcaggtcttaagtctagatgatttgtgtttttacattcatgtattttggaaattattccatgtgggtacccgtaaatctgccttatttttattgcatagtatttcattatataggtgtattttaacttatctactcatcttctattgaacatttaggctgattctaacattttactattgccaaatagattacaatgagtatctttatttttgcaaatgtgcaagtatagcaatatgagtagtagtactgggagagcacaggtctgtgctttttaagactttgatagattctgccaaattgccctccctaaagactgttccaaattacacatttacctacagtgtatgagaatgtctgtttctctgtccctcatcattacggcttatcataaaactcattgtagagcagtattattaaagattgtaataaaaagtttattttattaaattttggctgggtgtggtagtgcatgtctgtagtcctagctaccccggaggctgaggcgggaggatggcttgagcctgggaggttgaggctgcactatgttgcccaggctggccttgaactcctgggctcaagtgatccttctgcctcggcctctgaaagtgtggggattacaggcatcagccactgcacccacccggtaatgtactttctataatggaaataaattaagagctttgagtgtagctattctgagttgcaaacttatctgtatactttggataaaaatatctgagctaacatgtactaagaaacctgagcttacttggaagactgcttcacttttgcatgaagttagaccctaaggtaatcagagcaatctataagaataacttttctatgcattagtaataagttgtcacaaaaagtaagagaaaaaatatcccatccacagtagcacagaggtataaaatatctaagaataggccaggcgcactggctcatgcctgtaatcccaggactttgggaggccgagattagtggatcgcttgaggctaggagttggagaccagcctggccaacatggcgaaaacctgtctccactaaaaatacaaaaattagccaagcacagtggcgtgtgcctgtagtcccagccactcaggaggctaaggcacaagaatcgcttcaacccaggaggtggagattgcagtgagctgagattgtgccactgcactccatcctgggtgacagagtgagactctgtctcaaaaaaataaaatatttaagaataaagccacatgagatatgaaagcatgaaaggcagaatattataaactacatgacctcaaacccttgtactgcaaaagcttagaaatactgaccaaatataacaaatatcccattaaggatataatttagctcccaagaaagtaaggcggctctcccttgggctaaaatggaaaacaatttaaaaaccagagtagaaagtagaactaatgctttaagaacatgagagttggtggaggagcagttgttaatgacgtgttactcctagtggaatagcctcccaccccctaataaatagcccagctaatttatgccattacayacacctagattttagttccagaccttgagctgtgggaccttgggcaaggcctctttgaattccaggtttctcacctgcaaaatggggaaacaatagtacccaccttttctggtggctgtataggttaagttaaatggaaataacacacaatatattgagtgctaactgtgttccagggcagtgccctaagtggtatgtataaattcacttctcttcataaggtggactgaattgtgatgccctccaccaaatccctatgttgaaaccccagctcccaatgtgatggtatttgtagatgaggccttttggaggtcatttggtttagataaggtcatgagggtagggccttcatgatggggttagtacccttataagaacagcaccaggcagtttgtactcctttcccggtctcccctgcatctggtatcaggacacagtgagagcgcagccatctgcaagccaggaagtatgagcccttactgaggaacaaaatcggctggcatcttgatcttggactttacagcctccagaactgtgagaaataaattattgttgtttaagccattcaatctatggtgtcttattaaggcagcctgacctaatacataaggcagcaaaggcattctcaccataaaggcataggttataatggcttcctggtgacaagagacaaggtgatgagtcaggtagctggaaataagatccttgcttccataaagctaggattctcaaagggtcatatgctcagttaaagcctggcctagaaaatattcacaggaagatgaaaagcaagtttattcatcttagtctgagttctgggtggatgggggaaaaagtgtctgacttgagtattcataaccagaggcttgtgctcatgaaagtctgagattcaaatttgtttaatttacatggttcagcaatccctaagccagtaagctaccccaaaaagacagtccaaagctagaaaacaactttgggccacactctcacatcaggttacacaaatttctgtggatacagctacactttacatgagttcataatgcaaaattataaaacctacaaaaaaaatagccaaccagagtgtcatgatacatgacgtagaacataatcagaccttcattaactggtgatagcagactgagtataaatcaaaatgagtatgaaatgattatagacatttaaaaaggaatcgaaaaagaaagggatactatatttagaaaaaagaccaggctgggcatggtggctcacgcatataatcccagcactttgggaggtggagatgagtggatcacctgaggtcaggagttggtgaccatcctgactaacacaataaaaccccttttctactaaaaatacaaaaatagctgggtgtagtggtgcatgcctgtaatcccagctactgagtaggctgaggcaggagaatcacttgaaccctggaggcagaggttgcagtgagtggagatcgcaccactgtattccagcctaggcaacagaacaagactctgtctcaaaaacaaacaaacaatcaacaacaacaacaagaacaaaacaaaagaaactaggtatatttgaaaaagaaccaaaaagaaaaactcaagggaaaagttaaacaagtgaagagtattattgaatttttgaatgtatactagaaagaaattacccattatgtaacagagggagaaagagagaggctgagtgacattgcagataaaatgagaaagtccaacatagttaatagaagttctctaggggggaaaaaggagaggagaggagaggcaatatttaatgagaaatggctggacttcatgaagttaattggaagaaaagacagattatctacaaaggaatgacagattaagaccgtaatagtaacaatagagatcctgagagaaattactatctagaatttttttactagctaaattattcaaaattgaaagtaaaatagacatttcagacaaaaatgtgagaatgtaagctcagtgatgaaagggatttttctttctccactgctgtatctctactaacttgaacaatccttggcacatagtaggcatttagtaagtatttgttgaataagtgaaaaattgaacagtctctcacagttgcttctggaagagggaaattgaaatgagaaggaaggattgagatacaagaaagactattgagtagaacagttgttaaacatgagtaaatgtaaataaatatactttagtggtggctcatgcctatcatcccaacactttggaaggctggggtgggaggatcacttgaggtcaagagtttgagaccagcctgggcaacatagaccctgtttctacaaaaaatttaaaaaattagctaggtgtggtggcacacgcctgtaatcccagctactggggagtctgaggtgggaggattatttgagcccaggaggtcaaggcggcagtcagccatgatctcaccactgtactccagcctgggtgacagagtgagactgtctcaaaaacaaaccaaaaataaataaatatactttataaaactactataattttaattatgtctaatatgttacagttttacaaacaagatggaaataaagttcctgacaacaataggatgtaaagcagaaagtagagattgtagttaaagtagtctaaggttgtgttttttttctgggaagaatttagagatgtggtttagttaaaattcagatgtaataaatttcaaggatagggtttttattttctggaatgtgataaactagttttctgaggaaactattctcattctagtacacctgaatatgctattgacagggacaaaatgagcaatttttttcctacatagttgaattattggaaggccagaaacaataagaaaacatgagcaggtgctaaagccagcatttgcctgttagtatcttctgattcctggtgtctctgagccggagttttaatcgtaatagagggaactttccctaacttactttatgatgatagtaatttaatattactatcaccagacaataacatttttgtaaataaatactaaggccattttcaagcctaaataaaggaccaaaagtcctaaagacattgttaaaatgtatttagcttcatataaaccaataatacagcattatcaagttaagttgattttaggaataaaagagtggtttatcatctgaaaatatgttaatgtattgtatctgttaatcatctaaaatctgtagcattaacagactaaagaggaaacatccttggatcatctcaacagatgcagaaaaagcatttgataaaattcagtaagcattcatgataaaaattcatggtaaattcaaaagggacctttcttttctggaccaggatggattgttctgtattgctcctgctaagtatagctcaaaaccctggacactgtatgtaaaacaaacataggaagaatttgaaaggtaaagagaagacgacagaccagctaggggtttcacgacccatggaatgacatagcagtgagttccctggacttgcttgattgtttatttgcctcatataacgtaagtgttggatcaactggcaacttagtcagaaatggcaatgggaacatacaccccaagaaagccaaaaacagccttttctctttaaaagatggtgaaagaggaaacatagcaagacagaaacttttggacaataaccacgctactctagccacatgccatggaaagaccatggctcctccccttcgctaactcctgttaacccctgttaatgatagataaaaggkgtagaaatttgaaaaatatttaatccacaggaaggcaggaaaaagaaaacggaaaatagaaaataaaatgtcagacttaagccctaacattttaataattacgttaaatgtaaatagtctaaacacacaaatttaaagacagttggcatattggatataaaaacataatccaactatgtgagtgatacattcaacaacttggcrttatgctgagtggaaaaaaaacaatctcataaggtcatattctgtgtgattctctgggtataacattctgcaaatgacaaaatgatggagatggagagcagattaatggttccaatggtttgggatgatgagggagggtgtagatatgactataaagtggtagcaagagggagatcttcgtgttgatggaatagttttatatcttgattgtggcaatagtaacatgggtctacatatgtgataaatagcacagaactacgcacacacatcaggttttttctttttgatattgtactatagttatgtaagatttaactattgttgggaactaggtgaagggtacataggacctctctactatttttgcaactccctctgattatttcaaaataagctttaaagaaacctatagcaaacatcatactcaaaattgatttattaaaagtattttctttaaagtcaggaacaatacaaggatgcctactatcatttcttgtttgtttgttttttttgttttttttttttttgagacagagtctctgtcacccaggctggagtgcagtggcgtgatctcagctcactgcaagctccgcctcctgggttcacgccattctcctgcctcagcctcccgagtagctgggactacaggggcgtgccaccacgtccggctaatttttttgtatttttagtagagacggggtttcactgtgttagccaggatggtctcgatctcctgacctcgtgatccgcccgcctcggcctcccaaagtgctgggattacaggcgtgagccactgtgcccggcgcctactatcatttcttacattcaatagtttacaggcagtcctattctatgcaataagatcagaaaataattaaggctgggtgcggtggcttacacctataatcccagcactttcagaggctgaggagggaggaccacttgagcttgaaagtttgagaccagcctgagcaatataatgagaccttgtctctataaaaaataaaaaaattagccaggcgtggtggcaggtacctagtcttagctactcaggagcctgagccctggaggtggaggctgcagtgagctgtgtttgcaccactgcacttcagcctggatgacacagcaaaaccctcaaaaaaaaaagattttaggcgtggaaagagaaaaaattataacctgtaagggagtctaggcaatgagtacctggcatttttactttctattatatattgtgagataggctctttctctcaccaggttttctctgaaactgatgatttctaatcctaagagccaagggaaaagagtaacaaaaacaataacatgtccacacactggaaaacttatcagtgaaaaatatacttcatgggatggcaagaagcaacataggattgtagttgacatgcagctactattattatattattatgattattaattttactcttcaagactcttatttggtgtgagtctagatctgttagaaggtcactgatgaaaaaggatgtgtgggtgtccaagctgatctgattcatacagctcaatatatttatttattaattttgagacagggtctggctctgtcacccagactagagtgcagtggcatgatcaaggctcacggcaacctctgcctcccaggctccatttttatttattattattatttttaattaattaattaattttttgtagagacagagcctcaccgtgtttcccaggctcatctcaggctcctggcctgaaggagttctcccaccttgaccttgaaaagtattgggattatagccgtgagccaccgcgtctggttaagtggttaatttagaaatgtgcagagttaatgttcgtgtttttctttttcttttctcttttttttttttgagatggagtttcgctcttgttgcccaggctggagtgcaatggtgcaatcttggctcactgcagcctctgcttcccgggttcaagtgattctcctgcctcagcctcctgagtagctgggattacaggcatgcaccaccacgcctggctaattttgtatttttagtagagatggggtttctccatgttggtcaggctggccttgaactcccaacctcgggtgatctgcctgcctcggcctcccaaagtgctgggattacaggcgtgagccactgtgcccggccagtgttcatgtttatttttcatagcgttaaggaactgggtgagaatcaaaatctggaggagagtttagagttttcttcatggttaaatttaaaaaattctatagaacaaatatatttagtgtgtgtaggccgatggcgttagatttccatacactcaacattggggagaaacctcattggcagtggagtggctggtggtaccagctgggggtcccttctttggtcctttgagtgcagagtctttgccctggttgttccctgctttcactattaggagaagccacttgactcatggctggcagatagcacaccagtttcagtaccttgctaaatttatagaaaaccagtgtattaaacagcgaggtatagatagaaactgttttccaacagtgggtatttgaatattaagtagtagtaaattagccaggtgtggtggcacacacctgtggtcctagctacttgggaggctaaggcaggaggattgcttgaaccctggaggtcaaggctgcagtgagccatgattataccactgcactccagcctgggtgacagagcaagaccctgtgtccaaaaaaaaaaaaaaaaaagtaaagacattgttttctttaaattttcaaacttctaaaaaagaacagagaataatatattgcatacccatgtagttgccamcttaatttaacaaatgttaatgatttgttacattagtcaagattaaaaaaatggtgtacagtggataaagttgaaattttctttactgtctcaatctctctttcccaagctgtagtcactctcaaagttggtgtgcattccttccttttagggttattattattctaaaatgtgtgcatatgtctatttgtctatcatgcagatattcattctcttatttttttctgaacgttttaaagctttagtgtcacatttagatgtttaatccatttataattcataattgtgttagcatgaggtaagggcttaattttgtctttttgtatgaataactcatcattactagttttgtctttagcagagtttgtttatgcaggtataagcaaatatgaatatatatttttatttgttccccttattttgtattctttaatttttaattttggggtatataatacatgtatatacttatagggtacatgagatattttgttaaaggcatacagtgcttaatcacattagggtaaatggggtatctatcacctcaaccatttatcctttatttgtttaacaatctaattatatactcttagttattttaaaatgtacaataaattattattgactgtagtccccctgttgtgctatcacatactagatcttatttattctaactatatttttatacccattaatcatccccacttcccccccaactactctttctagtagcttctgttattggtagttctactgtttccatgagttcaattgttttaatttttagctcccacaaataagcgagagcatgtgaagtttgtctttctgtgcctggtatagttcacataacacaatgacctccagttccatccatgttgttgcaagtgacaggatgtcattcttttttgtggctgaatagtactccattgtgtatatgtagcacatttttgttatgatgaacacttaagttgcttccaaatcttggctattgtgaaatggtgcttcaataaatgtgggagtgcagatttactgatttccttttttggggtatatacctagcattgggattgcaggatcatatcgtagctctatttttagtcttttgagaaacctccaaactgttctctatagtgactctaataattatattcctgccaacagtgtacaagggttccctttctccacatctttgccagcatttcttattgcttgtcttttggataaaagccattttaactggggtgagatgatacctcatagtagttttgatttgcattttgctgatgatcattgatgtttaacaccttttcatgtacttgtttgccatttgtgtgtctgtcttttaaatttttatytatttatttattttgagacgttatctcactctgtcacccaggctggagtgcggtggagcaaattcagctcactgcgaactctgcctcccgatctcaagtgatcctcccacctcagcttcctgagtagctgggaccacaggtgcatgccactatacccagctgattttgtgtatttttggtaaagacgagttttcaccatgttgcccaggctggtctggaattcctgagctcaagcaatccaccttccttggcctctcatagtgctgggattacatgcgtgagccaccatgcccggcctgtccgtcttgttttgacaaatatctattcaggtcttttgcctgtttttaaattggattattagactttttcctattgacttgtttgagctccttatatattctggttattaatcacttgtcagaagaatagtttgcaaattactttttctcattctgtcggttgtctcttcactttgttgattgttttctttgctgtgctgaagatatttaacttgatgtgatcctatttgtccatttttggtttgattgtcatggggtattcagatcatagcacattcaaatcatagcacttgtttgtacattttttttcttttaaacttcatgcattttgcatacaatttaagaaatctaacccagggtcactaagattttctcctatgttttcttccagatatttcatagttttatctctcacatttagttctattcctgactcatttcaagttttgcatattgtgtacagtaaggataaaataagcaaatatgtatatgcacttgcatatgaatatcgaatttttcagtaccattgttaaaaagattatcttttccctcaattgaattgccttggcaattttgttgaaaatcagttgacccatatgtgtgtgggtctgtttctgaactttctaattttttccattgatcattatgtctttttatgccaataccacactgtcttgattcctgtatctttataatataacttgagatcaggtagtataattactccaacaccctttttcccccaaaatgttttttggctcttctgatcctttgcgttttcatataaattttaaaaccagcttgtcagtatctaaaaaaaaatgcctgctagaattttgattgggtttgtcttgaatatgtagattaatatggggaaaattgtcattttaacaatagtgagtcttccaaacattgaccatggtatatctcttcatttagttacttctttgatttctctcctcagtgtttatagtttttaacttacaggccttacatttcttttgttaaatctattctaagaatttaatattttggggggatgctgttgtacatagcattttttaaacaggaagaaatacatatamattttattattacatgcacatgtgcgcatgggagtcaagcaagatataaatattcagagaaagataagatggttcatgcttgtataccatcttttgggggccagatgggaaggccattttttggatacataataactgtacgtatttatgaggtacatgtgatatttctgtacatgcatacaatgtgtaatgatcaacccagggtatttaggatatccatcacctaaaatatttatcacttctttgtgttgggaacatttcaaatcttttcttctagctattttgaaatatgcaaattattgataactataatcaccccagtctgtgatcacacactacaacgtattccttcaatataactgtatgtatgcattaaccagcctctcttcaccacccttctcccccttcccagcatctggtagccatcattctactctctgcctccaggagatctcctttattttagctctcacatgagtgagaacatgcaaaatttatctttctgtgcctagcttatttcacttaacatgatgctatccagttccatccatgttgctgcaaatgacagggtttcattctttttatggctgaatagtattccattgtatatatataccacattttcttcatttatttgttgattgacacttaggttgattctataccttggctatcatgaatagtgctgcagtaaacatggggatgctaatatccctttgacatactgacatcctttcctttggataaatacccagtaatgggattgctggatcatgtggtagttctgtttttggttttttgggaaacccccatactgttttccataagggctgtactaattcacgttcctgtccacagtgtatatgagttctcttttctctccatccaggccagcatctgttatattttgtggttttggtgatagccattctaactggggtgagatgatagctcactgtggttttgattttaattttcctgatgattagtactcttgagcatttttttcatatacatgttggccattcttttgagaaatgtctattcagatcctttgtccactttttaatgggatttttttttttgctcttgatttgagttccttatatattctggatattagtcccttgttggatgaatagtttgcaaatattgtctcccattctgtagtttgtctctttattgattgttacttttgcggtgcaaaggctttttagttttatagggtcccatttgtctatttttatttatttctatgcatttgaagtcttagccataaaatctttgactagactaatgtcctgaagtgttttcttctagtagttttaaagttttgggtcttatatttaactcttgaattcattttgagttgatttttgtgataggtgcccagtttcattcttctgtaatatggatattcagttttcccaacaccatttattgaagatattatactttcctctgtgtttttctggtacgtttgttgaaaaatcaattggctgtaaatacatggatttatttctgggttctctattctattccattggcttgtgtctcagtttttataccagtagtaacctgctttggttactatagctttatggtgtattttgaagtcagatagcatgataccttcagctttgtccattttgctcagcattgctttgactatccagggtcttttgtggtttatatgaattttaggattgttgtttctatttctctgatgaatagcattggtattttgatagggattgcatttaatctctagattgctttggataatacagtcattttaacaatattcttagagcctatttgcatagtacgtttttccatttgtttgtgttctcttcaatttctctcatcagtgttttgtcatttttgttgtagaggtctttcacccttggttaaatttattcccaggtattgaatattttttgtagtaattgtaaatgtgattactttttaaatttctttttcagctagtttattattactgatttttgtagttgattttgtattatgcaactttactgaatatattgatcagatctagagttaaaaacaaacagtggagtctttaggtttttctatatataagatcatgtcatgtgcaaagagggacaatttggcttcctcttttccagtgtggttgccttggatttctttctcttgcctgattgctctggctaggactcccagtactaagttgaatgagagttgtgaaagtggggcattgtctactaagccagacaatggcagaacaaaaaaataaaactacaggcaaatactcctgataaacacagatgcaaaaatcgtcaacaaaatactagcaaaccaaatcaagtaatatatcaaaaagataatataccatgatcaagggggatttatcccagggatgcaatgatggttccacatatgcaaatcaataaatgcgatacatcacatcaacagaatgaagaacaaaaactgttaagatcatctcaatagacatagaaaaggcgtttgataaaattcaacatcccttcatcataaaaaaaaaaactctcaaaaaattacacattaaaggaacatacctcaacacagtagaggtcgtatgtgacaaacccatagcttacatcctactgaatggggaaaagttgaaagcctttcctctaagaactggaaaaacacaagaacccatatttattgtgttcttgtttgttgttgttgttattttgagacagggtctcactctgtcacccccgctggagtgtggtggtgctatctcagctcacttcaacctctgcctcccaggctcaagcgagtctcccaccccagccccccgagtagctaggatgacaggcatgtgccactacacccagctaatttttgtatttttagtagagatggggtttcccatgttggccaagctggtctcgaattccttaagtgatccacccactttggcctcccaaagygctgggattacaggtgtgagccaccatgcccggctgaatgtttcttttcttcttatattgatatttgtgtatgtgttataacaattccttcttttaatgttatggagtggcttttttagggaaagactttttttctgtagatgtatctatattgttgctggggaaaggtgttttggctttgattctgggtgggtgcagtagtgtagtctccgtatgatttcttcacctttactcggactagtttcttggcttctcagtggtgtaggctataattgttggcggaggctgtgacaagactttgctggggactgatatgccagatgggctggtcctctggaatcagtagtagcagtggcattctaggaatgccagtctttgggctcccttgggcctccaggtggtatgcttgggtgctggcagtgccagtggctgaccaagtgggtgggtccttggatccccgcggtgacgtgtgaggagttgacagtggtggcagcagtggtgcgccagtccttgcaccactcagcagcatgtgtggcttttagtggtgggagcaggcttgataagctagtccctagacctccaggaggcatgcagtgatgggtggcactggtggtaggataggctaggttttgctctggagaactgtcctgcatactgtagaatgtttaccagcatccctgttctttagccagtaaatgccagtaacatcacatgggaacttgttagaaatacagtttcacaggccctgctgcactgcactgagtctagaaactaaggtgatgtggcccagcattctgtgctttaacagccctcaggtgattctaatgtatgctcaagcttgaaattccactgccttggtagattgcaaggttccccctgcccccagaaagaacctgtattagtcaaggttctctaaagggacagaactgatagggtgtgtgtgtgtgtgtgtatgtgtgtgtgtgagtgcacatatacatatatgcacacacacacatatctatatatgagagtttattaggagaattgactcatatcatcacaaggtgaagtcccacactaggccatctgcaaactgcggagctgggaagccagtccgagtcccaaaacctcagaagtagggaagccgacagtgcagccttcagtctgtggtcaaaggcccgagagcccctggcaaagcacaggtgtaagaccaagagtccaaaagctgaagaacttggatgttcaagggcaggaatcatccagcatgggagaaagatggaggccagaggactcaggtctgtcttctccttccgcgttcctctgcctgcttttatcctagttgtgctgtcagctgattaaatggtacccacccaggttgagggtgggtctgtctctcccagtccactgactgaaacattaatctcctttggcaacacccttacagacacagccaggaacaatactttgcatccttcacatgcaatcaagtggcactcaatagagtgtcacattacagaaccattattatcactatatcgttgactagcataatggcaaatttatgcttattgaccaattagtaattgcagagcttaatctttttaaggtagctttagccaggctattcagagagatgtgtatgtactttctacacatttgtgaaaaagaacaccagttgggaagaggatttgaactgaaatgggactacaaaaggtagtctccagtgagagacagactttgtttcaataaaaagaatagattttagtaaaatcctgtctgaaaatggagaggacgtgtgaaaggtacagaatgacccatctcttagaagtattaagcaggacttggatgttagttaaggtgaagctttcagtagtaatgcaggataaggagaatggcagacgtatactcttaagcatcctttccaggttttgtgttttagggttttcttcacctttttttttctcctgtggcacgtagctctaatcttctttgatagctacttggtgctttctgagatttagcagttttcctgcatgtatggtctttgacctttcccaggagttggcatgtgcactccagtgtgggattctttcctgtgtagttctctactgcctttggaaacagcgctttgtgattacattgacaggagctcctcttactatctgcttattttcagaaagaagttatttctcattcttgttttaaaggttattatctagatctggcctgttatgctcttcttttggtgtgaacagaatagaggggatttctatgctaggttttaawtaaggaacatttgtaacttaaactttcagaagatatctcacatgaaactggctgcctgccacaggagtaacttagatctctccaccttgttgtcaggagcctggaacagagatttttgcattggatatgagatcagattgacttttaaggtctcgtctgactctttgcctttcaagttttgatcagaagtctcagctttttttctccaggtttagatttaacaatctaaacctagttctaacattggtatgtagtgcctaataaatgttgcttaagtaaaatgaacttggaaacattcttcatggtatcctcttttttctcttgcagttaaaagggccaaattccagggttcaccaggtaaggccagctttctattatgtcttttcctcttgtatttgctgttatttcaaagcaatttaaaaaaattattaattcattgatcaaattcagtaatttgattcattacttcactaaattaattcatgaaatcattaatctagtgaaaaattagttttcttacctcttggctaacccaattctacttctcaataataactatatatttagaggttttgatataccttttccgactttttctcagaaaaaagtctgaaatagtgtaaaaggataaatattgacaattagtggaaacaatttttttttttttactttaagttctagggtacatgtgcacaacgtgcaggtttgttacataggtatacatgtgccatgttggtttgctgcacccattaactcgtcatttacattaggtatttctcctaatgctatccctccccccgtcccccaccccacgacaggccccagtgtgtagtggataaatattgaaatatcagtgtatcatgtcttgcagttcatgaacctgtttcagcttgagagtgtgtgtatatgtatctattgggtcatatataaaatttcttaaaatttaaaatattcaaatagaccatgtgaaacatatcttatgcaacctgcttttcccccagcaacacatcatgaaagtgtgtgtgtgtgtgtgtgtgtgtgtgtgtgtgtgtgtgtgtgtatgtgtgtgtctggttcgttcttttaaggtgctgtacagaattttgttgtagatttgtaccctgattaataggtccctgattgattaatacttgattaatatttaggttcccaagtttttgctattacaaataataaatgttcttgtgcacttctcattgcttgcttttgcaaatgtgtctatgtactagattcagaagtagaattgctgggtcaaaagtgtatatatatttttaaaaatttggtaactcctgccaaattgttctcttgcaagtttttactatatataccgagaccaaaagtttatgaacatttattttcccaaatccttatcaacatttgatatgaaactttaaaatctctgtccatctgaagattaaaaatggtatttccttattttaatgtgcatttcctcaattttgattgtcacattaggaagacttcctctggttactgctggggaaggagggaggggagctggagggttactggaaatatatgaatacgcttgagaacccaggaaaacctgaaaaactggaccttgggtgcaacagtaatgaaagcagtttctgagcagtttcttgttttaaaggttattatctttttgtctctgctggctctttttttctgagaatctgctctgttgtttctctcccagctggttttctatgcttacccatcttgtacccataatagctgcctcagtggaatttataccccttccttttagcttcagcaccaaccaccaattgtcaatatttatctttttaccctatttaaaatcttttgagagggaatcaggtttgtttcagcttttggccagctcatggattggctgctcttgggttatttactcttggtctggtcagctatgtgtgattggatgttggggtggagtacaaaataatgtaatataaaacatagctcagtggcctactgcactactactactggatatggatggagattccccttgtatgggcttttatcctcatatatctttaatataattataaattttccatgttgataagtataaaaccacaccattttaaatgatatttaaaagaaagacttaccttcagctgaaagtgtatgacgggttccattttctcatatcttctgtaacattaggtaatcatgttaagcaatgtttgccaatttgatgagtcaaagtgatagtttgctattttttcattgtataacattaggattaatttcttacatagaaaagcaaaccctcaattcagtgcccctaatcatggctgatgtggatgtagtgaggtgagtgccaaatgtgctgtaataagaattaggtgagacacctgagtttgaagtttcaggccaccacctttgtttagtaatcaacttgtttagtactcaactctcaggttagagaatttccttttctcaactctgtgataatatttctttttttggctgggcctggtggctcatgcttgtaatcccagcacttttggaggccaagatgggtagatcacttgaggtcaggcatttgagaccgcctggccaacgtggtgaaaccccatctctactaaaaatacaaaagttagctgggcatggtggcgcacacctataatcccagctacttgggtagctgaggcatgagaattgcttgaacctggtaggtagaggttgcagtgagccaagatcatgccactgcaccctggtctgggtgacacagcaagactctgtctcaaaaaaaaaaaaaaaaaaaaaagatttctttttatgtaacttgtgctttaggccaaactgagtagatcgagcttgaaatctattttctttgtgaagatttttccttaatttttgtccctgttaacagctcagctctgcagttctttatcactttttcttttttccttctggtatgtatctctttctacattttattaaatttacgtaccttatctttcctagtaggtcaattagatttggatttttccccccagatggcaagtgggctatataattaacatagtaggttaggattaacattgtaatagattaaataaattagaacaggaaatatcaatgtatcatatcttggcattcatgaatctgtttcagtttgagtgtgtgtgtatgcatatctgttgggtcatatataaaatttcttaaaattaaaaaaatagtattttagattatgctcttgaagatagcacgtagttttataatttcggcaactctgctatgtcttgaatgaggctatgttgtacaatatagcttaattttttcctgcacatgtaatactttaatttctatattgcttaattccaagggctttgtgagatgggtaacaatctgagcactaagtattatgtctccattttgtattttttcaaagataaatttaacacatatgtgaccctgaaagtacagaatgtgaagagcacaactgtagcagttcgtggtgatcagccttcctgggaacaggatttcatgttgtaagtattttgcagcagcagtgtgcctacatattttataatctttttaagggaattgcattggatgaaacaattagaagattttgtgtatttttgagatttataaaatgtactgrcactgttaaatactgttttgaaaactgtggagttatagaaataagtgaggttcatggtacatgaagcacaactgcagttttgttttctcatggattcgtaatttgttcttagagatgaatgataatgcaggtaaactcccaattgatttgtgttggtgaaaaactacataggcagattttctcagtggtcagaattagaatacagtacaacagacttagcatgacattaaacataacttcatctttctttgattctgagaaggctctttgaaggaatgtggccatgcatgtgagagactgtatcttcatgtgtacctcagtcatctgttttagaggctgaagatttctgtgcttataatccttttgctttatggagtaaaatgtcctatattcaattaattaaaatgaataaatattagtagaatttctcgtgtatgacaaagtttagtatattatgattttaattaaactttggctttaaaaacttgttatttctttcttttgtccctttagtttcaggatttttttgttcctgttctacaaaaggggagaaaagtatagaatatattgaaggactgggcaaatcatttagcttcatagggcactagtttccttatctgtaaaggtcttcctttctcagaagattatgcttgttttttctgggagttggaggtgggcatgaaggggctgaatgagaaaacgtactgaaatttgctgtgaaatttgaaactgaactgaaatcgatttgcatgttttatagtgcagctcagagggacatagggatggttattatttttaaggggagacatttccaatcctctgggctcttggtatattgctgctttttttttttttttttttttttgaggcaggatctcactctctcacccatcctagagtgtggtggtatgatcatagtttactgcagcctctaactcctgggcttgagcgatcttcttgccttagcctcctgagtaatggaaactacaagcatgtaccatcacaccttggctaatgtttttattttttgtaaagatggggtttcactatgttgcccaggctgatctcaaactcctgggctcaagcaatcttcccgccttggcctcccaaagctgtgggattacaggtgttagccactgcacccagcttatattgcttcctataggaccattattgtgatagttaaaggcaaagattataaggttttgggctaggacaatagcagaagacatagaaaaggatgaatagaaggtattcaggaagtagaaccaaaacattttcttggaagatgggttgggtggtatgccattcagtaggatagggattaatatcagttatggacaatcttatatttgagattcttataggacagataggaaggatgagaggtacagaagatagttagaaacctaaagctggcactcagggaagaagtctgctttggagaaatattttggtcagttgaagccataggtgaagatgagaaagcttagggagagaatgtgtatggtgagaaaagggactggagtagaagctggagagtggcagcatttaatgaggggacagagggaactaaaaaggattgaacagagaggtaggagagccaggagataatggtgtcttggaagctgagggagaactgggcttcaaagagaaggaggccaatggtgtcatgtttctttctcactggttgcttctctctcaagattatataagcctcatttattccctctctcagtgacagtgatatgagaccgagagcacctgtttccttctttacacatgcagtgtacagagtcagctacaaatggtttatgcaagtctctttccataccagtatgttagccatagtcctggctatggtttataaacctagcacttccagttggctataaccataatttccagttataactcttcccatcatatgaggcacagtgatcttctgcagcctctcatcagcatagccagcattattcttatgtgtttattttccaatttcccatagcacttccccttttgaccctgctgtgatatgtgtgaattttcttcctgtctctcccacgttgagatgctgtgtgaattttgccctcttcttttacacgtgggttttattagctactttctctacttttctgctcttcctactccttattcctcctatcctgtcctattttagttatttacttattttttttggttcactccttgcagaacttagtctactaccctgtccttttgtcaccggaatctccagtgctggtttcctatctcccgttctcctttttccttctccatgatgtattatgtggcagtatctaatattcgttttggtatttcttatattatttgtttttaatattttcatatcttgtttttaggattagattgttcatttcttaagggtaaggtgggcatcttcactatttgtgtgcatttgtgtagcccagagtctgctatacacgtgtttatgtatattgttgattgaattaacagaaaagaaacttccctagggtcctgggtatgaagcataaacagagctctcagacctctcttagctggacctgctgagcaaatgtaggtgagatgagaagcttcttatagaatatatactcattgtttgggccttctccctagagagttctctgaagagcagattttcttctttatctgttcaagtcaagctgttgaagacctctggctatttcttctgtctgttggcttgagatgctatttgggagttgatttgggaatattatatatgtatccccaagcaaatttctttttttctttattttgtgggacaggrtctcactctgttgcccaggctggagtgcagtggcagcatcttggctcactgcagccttgatctcctgggctcaaatgattttcctgcctcagcctcctgagtaactgggactacagatgcatgccaccatgtctagctaattaaaaaaaatttttctgggagacactagrttttgccatgttgtccaggctggtctcaaactcctgggctccagtgatcttcccacctcagcctcccaacatactgagattacaggcatgagccattgcacctggcccaagcaatttttcgattccatattcaaatgatggataagtccaatggatttgaggatgtcacatatcttttccaagactaattggttaattaggctgaattaaattatgtgacaaaaagcttagtttctccactgtgaacactgtaacttagtggctaggcttattcatctactttgtggctctgaacagctctccagatagcttagaagtttttggacacaaaaactgagtcctatattatgtttctactccaaagcactaagtcatatgtcttgtaagtgctcaggaaatgctaattaaatgaataaattaactcagtacattctatgctgtattatatttatataaaagggacaaattttctttgctttattcattttcaacacctgacatgaattctgtggctgtcattctatatctcaaacttgtgaatctgagaacatttattttatagcacaacagggaacccaagctttctctaaagtacagacttgaagcttctacttgtgataaatagctgttgttttcctgagaatgcctttctgctttctctgctggaattggtcttttctcatctttcttggattacccctcaagtaaccttgtgtttcaataagagctttctggagaacgtttttagcattaacacaggtactatttgcgtattctagtttaatactgggattatgtttgagttagtccttccaagcagatattcaaccatgtatgatactgcttttaaatagtgcttatctggctctttatggaatgatttcttttcgaattttttcccctggttattattataggaaaatcattgtatttatcattatcccatggtaataattttgcttataagtgacagtgcctagcttaataatgattaatgagtctccagggactgagtggtgtgaactagcacactctagagcccctcacttgcctgtgaccacatgttcctatcaaacttatatgttctcagggaccctacttctacctggactccctttcataaatcccccccgccccgccccggcttttttggtggggatggagtctggctctgtcactcaggctggagtgcagtggcgtgatcttggctctgcctcctgggttcaagtgattcttgtgcctcagcctcccaagtagctgggattacaggtgtgcaccaccatgcccagctaatttttgtatttttagtagagacagggttttgcaacgttggccaagctggtctcaaactcctgacctcaggtgatctgtgcacctcccaaagtgctgggattacaggcttgagccaccatgcccagcctgataaatcttgtaaagtagacttacctttcctaaaagtttcctgtatacgatgtgtagtttaagttgaagcagtgttagttaacaataamacatataaaactgttgcctatgggtggaaattggcaggcaggcctggcaataatgtccttattacttggcctcatattgtgtgaaactgcattagtctaattatgattgtatctccaaagcggaaagaatggatagacaaaggcatttttctttcttttcccgccccccctccccactgaggtttaattgggatataagaaactgtacataattaatgtatacaatttagacatttatatacttgtgttaccatcaccataatcaaggtagtaaatatatttatcacctctaaaagtttacttgtgtctccttttttttgttgtatgtgtgtgttaagagcatttaatatgaaatctaccctcttaaattttgaggtgcacaataccttattgctaactggaggcactatgtggtatagcagcaggtctctggaacttatttaactgtaacaaaggcagttttctatggatacctattataggtttcttggagcctaaaaatggtcgtggcattctgggaaattttgatttttcctgaagacaggatcctggtgagaaagcattcaaagtttagcaaaacaggagatgtagttgtttctttcatattgtctagctttcctcaaagggctttcctctttcccttagtgagattagtcgcctggacctgggtctaagtgtggaggtatggaacaaaggactgatctgggacaccatggtggggactgtgtggattgcgctgaagactattcgtcagtcggatgaggtcagtcattgcattttctgtttggaagtatggttcccagcccatgcttctccccatgctagctccactttagctaatattcatccatgcatcttgrattattcttccccctttctaattagagggcatgcaacctgcctgttcctaacttcacctgaaggttcagatgattttatttatgtctggcctaccctgtgtcctgtgacaactcacaggctccagagcacctcttcagccttatcaggtagatagccccttctgaggtatgtgtgtgtcggtgtgtgtgtttacttagggtacttgtggtttctgtgttctcttctaagtcactgccctgggaggagtcccattaaacttccttagccagctggctggctattctctgctttgtttctttgagttaccaatctccaaggaactagttttcagtgcccttcttctgcatgtaagcctgacagagtttaaggaactaccaggcttggcaatttgtattcacactgtctctatacgttatttctaggattgaactcttgcctcactttcctagactagaccataactcagcatcatttccccactttggacctggacaaaatctgttatattcctgtttggtgttaacatggaccatgagttttctctgggagtggggaagttgaaattgcctgtattttctgtatttcttttagttctagctaagtctctactccccaggcagatgggcagttcattttcattgctgccccagttcaatcctatttagccagcaatgttagtagctttttactgactagaaacagtgacacagtcattaagaactgtgcaggttaaatattgatccacagaggtacttagttttagagtatggtactccagacattctgtcctcgttagacctgcagagctgagcacagtgaaagctgctctccccaccaargagggaaaacagaagccacatgcagtggaggcaggtggtgatagtggtgtgtttgccttatcaggatgtgaatggccctcagaagctcaaacaaggaacttcagagaaaaaaacctgactcttgaactaagagggagccaagaaagattaaactttaatcttagatctttgtttcctaggaagggcctggggaatggtccacattagaggcagagacgttaatgaaagacgatgagatctgtggaactagaaacccaactcctcataaaattttgcttgatacaagatttgagttgccttttggtgagtaaaattttaaaactatttaataatttttaccatattgtttggaattgtttgctagttgtttcattaatgtatattttgtcacctcagccatctcctttgaggatattttgtcttcattcactctctttctcataacacttcacccagggaatggtgcaaagtagaatatagaatagtgctcattaaagaatctacactaaaaagcattctcttcaactcatttaattttctgtgactatttattataatgacttatgaaatatttgcttgttagatttattattttgaaaataaacatttattgtcttgaagtgactatatataccttctgatttgttaatttaagtattaaatagcactgataaatagaataataatttaaaatgtaaattaaatcacaatacatgctcatgataaaaattcaaatagtaaggaaatgtacatggataaagttaaaagtttattttcccagttcctttaatcttctctgcattctccagtgtgaaaccactgttaacattcttgtattttggtttagacacatgatatttattttccaaaaacttattttggcaaaatttggatcataccctatgtaatatttatttgctgatatatagtgttttacaaactgcttagacatttatcctgaacatcgctccatgttatactttaagatctgtcttattcatctgaacagatgcctctaccataatttatcttttttttttttttcctttttttgagatggagtcttgctctgcccaggctttagggcagtggcatgatcttggctcactgcaacctctgcctcctgggttcaagtaattctcatgtctcagcctcctgagtcactgagattacaggcttgtgctaccacacctggctaattttttgtaatttttagtagagacagggtttcaccatgttggtcaggctggtcttgaactcctgacctcaaacgatccgcccacctctgcttcctaaagtgctggaattacaagcgtgagccaccatgcctggcctaccataatttatttaagtaatcctttattgattgacaggtgggttttttcatttttttttttttttgatgttatataccgcaaactaataactctgtatatctttgcccattttgagtctagaataaatttcttaaagtagaattgctggatcaaagtataagtacatcattactttttatggaatctactaagttccttgtccaaaaggttataccaatttatactcttataaattatatctggggagtgcctgtttctgcacatccttggcagtcttttgtgtttcccaatggttaatctttatttgattattttgtatgatatcttatcaggggaaattcagcccccgatatttcacgtgggtccttttccatttttcctaagtgttggccggtctaagaaataaagggaaagagtacaaaagagggaaattttaaagctgggtgtccaggggagacgtcacatgtcggcaggttctgtgatgccccccaagccacaaaaccagcaagtttttattggtgattctcaaaagaggagggagtgtacgaatagggtgtgggtcacagagatcacatgcttcacaaggtaataaaatatcacaaggtaaatggaggcagagcgagatcacaggactggggcgaaattaaaattgctaatgaagtttcgggcatgcattgtcattgataacattttatcaggagacaggctttgagagcagacaactggtctgaccaaaatttattaggcaggaatttccttgtcctaataagcctgggagcactacaggagaccagggcttatttcatcccttatctacaaccgtaaaagacagacgtccccaaagcagccatttcagaggcctccccttagggacacattctctttctcagggatgttccttgctgagaaaaagaattcagcaatatttctcctgtttgcttttgaaagaagagaaatatggctctgttccgcccggcccacaggcagccagacttcaaggttatctctctttttccctgaacatcgctgttatcctgttcttttttcaaggtgcccagatttcatattatttaaacaatttgtgcagttaacacaatcctcacagggtcctgaggccacattcaacctcagcttacaaagatgacgggattaagagattaaagtaaagacaggcataggaaatctcgagtattgattggggaagtgataagtgtccatgaaatcttcacaatttatgttcagagattgcagtaaagacaggcttaagaaattataaaagtattaatttggggaactaataaatgtccatgaaatcttcacaatttatgttcttctgccatggcttcagcctgtccctctgttcagggtccctgacttcccgcaacagtatcttgttttagtttagttgatttctattagttttattttaattttttactgttcatattattgatatttgcatattctattgttattgctgtcattttatgatctcagtgtatttgtatcttgtatcctatggtgatttaagcaaaaatgacatgattttccagctagctcagaaagaactaaactcagaacaactattatttcagaaaaatagaaaggaagtctttcttgtgggactgtagaccaagctgcaagtgaagggaaaatcaattggagggagtgggtcttggttcaaataccacagatattgaccattttcaccaaattttagtagatattcttgaataaatgttttttcttttgctgtatgcacttagaaccatttccagagactttaaatcgttgtttttttaatgttgtattactttttgactgatttcactcactaattacatagttacaaatgttatataaaatagacattattcttctacttttagtagttgattttatttaaaaatcagggcctggcatggtggctcacacctgtaatcccagcattttgggaggctgaggtgggtggatcatgaggtcaggagttcaagaccagcctgaccaacatggtgaaaccccatttctactaaaaatacaaaaaattagctgggcaaggtgtcgtgcgcctgtaatctcagctacttaggaggctgaggcaggagaatcacttgaacccaggaggcatggaggttgcagtgagctgagattccaccactgctctccagcctaggtgatagagcaagactctgtctcaaaaaaaaaaaaaaaaaatcagtaataacaaagtaacatttatggtgaattattgtgtgttggtgggcatgtcactaagtatttacatatgttagctcagtaatcctcatttcagtcctttgaggcaggcccaactattattccccactttagagataagcaaactatggcagagagtatttaagtattttggccatggtctgactctagagcctgggcttttaattttaactatttgtataatacatttaaccacttcctgttgggtattttgattgtttgaagtttgtactgttataaatagcactgcaataaacatgcttgtatctctctgtatttttttcttcttaaaactatttttgtggaatgaggcaggaataaattaataatggtttaaaaagttatccagtgaaaagtcccttcagaaatccattttcttcctataggctaccactattaatactttcttgtgtatctttccagagtcagtttctgaatataagcacacacacacacacacacacacacacacacacacaccaccatcttctttttaaaacgcaaatagtagcatattctaacacattccctgtgccttgctgttttgcacttastatatcttggtgaatcatcccacatcagagcatatagacctgcagcagcagcagctcctctgccaccttgcacttcccactctccttctttgtaacaggtgcatagtataccattttatgggtgtaccatatggatgagaaagcactatacaaattacgttgtagactatttgaaggtgtgtgtaagtgtttttaaataagactttgaaatattgctaccagttgttaaagagctagttgaagggaaggagctgaagttttggacaggtggaacaaaggagaaaggaaagggctatatttgctttattcatgtggctactagaaagtgtatctgttgaaatgtctctgaagttgatatgatccatatattgcctgagtgtttctcttcagtgctggttagatggtcatacttgatgtttttaaaaggtgagttttggggagaagttgttatagtcaatgtaaaatgtttaggaatgaggatataccattataccattattttttaagaattcaaatattttcacttagagactcacttaacaaatatttgagcatctaatattttccaggcataaaacctgtgagtattttttaatagcttcttttaaaaaatttttaattgtggtaagagacataactgaaaatttagcatcttaaccatttttaagtgtacagttcactagtgttaagtacattcacattgttgtgcaacagatatccagaactttttcaccttgcaaaactaaaactctgtctccatcaaacaacttctcatttccccctccccacagccactggcaacgaccattctttcttttctgtgaatttgactactttagttaccttagagaagtgaaatcatacagtatttgtcttttttgtgatggactcatttcatttagtgtaatgtcctcaaagtttatccatgttatggcatgtggcaggattttcttccttttaaggctgaataatgctccgttgtatgtaaatctctcattttgttaatcctttcatccattagtggacacttgggttgcttcaactcttggctattgtgaataatgctactaggaacttgggtgtgcacatatctctttgagatcctgctttcacctctttcgtatatataatccaaagtgggagaactatgtcacatggtaattctacttttaatttttttgggagaaaacctttgaattttgagcatctcaatatctcagcatataacttttcttttaagctaatcctttggatggttttggtcttgctgaggggaaggtagtatggttacatagaaagaatgtagtttttggaatcatacaaaccatggtttgaatcatggctcatctctttataaactgtgaccctgaccagattattttagctctctgagcttcagcttcttcatctacaaaataacaatgggaataacagtacattgtattggtttttgtgaagagtaaagataatgttcatgacaagaaccaaaccatcagttaaaacttgtgcatcactaccaccttctgacttcagtcattagacagagtaaagtgttatctgctgatgatttattacctgctgatgtgatttcttttctttttcttcttttttttatggtagatatcccagaggaggaagccagatattggacctacaaatgggagcaaatcaatgccttgggagctgacaatgaggtaggagcagccttatttgcagtatagagagatgggggaaaatctccaatgctctttataggttgcccagggaggggcccaagagcatgttgtcctgagaatgaaatcacttaaattgcattgaagaaaaaaggcagctagaagattgcctgaaatgtcactagaaggttccatctccaatttattctgttcttcccactctcccatactgtggtactagtctggctgtagactcttagagagggagcttgtaccagggaatctgtcctcttttgttacacctgtgagttggaggcatttcttttgcttctactgtctctcagttttttggatattattcttatttgtgtcctgtttttgaggatgtttagactattgcattgtttgttcttgctggtcctaacttacctccagagatgaggctggtgtgtataagagaatgcattcagctcaacctggggcatcaggattggagaatgtttttgttattgctgatggagggaaaagatgataaatttgtttattttggacatgtgggctactaaaaaatgggtctgattataagatatactttgagtgccagaggatatttcagcagaaattgttgataaacaatttcatgagataatttgaagttgaggtttgaatgggtagggagctgtaggcatagagcttcattaatatattagtaacaattgatgtcataggaatggaaaaacttgctcaggtagagcgtatggagacagtattaaagaacaggaacaaaatcttgggaaaccttagacatagaattctgagaaacaaaggagactgagaaagggcaaccttaaagagagagaataagataaccaggaaagattaatggaacaaagaaaaamagagattcaaggcagaaattcttgacagtatcacatgttaaatcaagtgaattatgaaatagagctattggatttggtgattgatgacgagtatacatccatagactagtacagaaagccaaaatgcagtggtttgatgactgtatttgtttcctacagctgccatcacaaagtaccacaaactaggtggcttacagcaaccaaaatttgttttcacacagttctgtagactggaagtctgaaattaggctgtcagcaggatcagttcagctccgtctagaggctctgaaggaggaagcatcctgtactcttctgcctctgatggttgctggcagtccttgctgttccttagcttgtagatgtatcattctaatctctgcctctgttgtaatgtgcctccctgtgtgtctgtctgtgtcttcacaatgcattctcctgtctctgtgtgtctgtgtctaaatttccatttttcttgtaagaacaacagtcattgaattaatttgattatatctgcagagaccttgtttccaaataaggtcatattcacagatacttagggttagaagtctaacatatcttttaggacatagttcaacccacagtgagttaaatgaaagatgaagaaatggcatttgggacaagcaacatctactcttttcagggttttccgttacctcctttattcttggtaggctttctgttattaagctgtataactcttctcatgtccacaccaacatcctaacttttcttcattgttgaaagctccagtcctctttctccacttagtaactctgagcatttgtgctatctttgcatgtactttactttgtgttttcgttcttcccaagcctggctgtggagtggtattcagcctttcagactgccatcatctttgttttcctagtaaagaagcatgttgtacttttcgttttataggctttgctctgtgtcattatacagaatcagaagaagggattaaaacaatttaaaaaccaaatataacttatacaaaaattgtggaattttataagttctaataataatggttcttggtctgtggttcccaactgcatatcagatttttgctttctgttttttttttttaattttattatttttatactttaagttttagggtacatgtgcacaatgtgcaggtttgttacatatgtatacatgtgccatgttggtgtgctgcacccattaactcgtcatttacattaggtatatctcctaatgctatccctccccccctccccccaccccacaacaggccccagtgtgtgatgttccccttcctgtgtccaagtgttctcattgttcaattcccacctgtgagtgagaacatgcgatgtttggttttttgtccttggtgatagtttgctgagaatgatggtttccagcttcatccatgtccctacaaaggacatgaactcatcattttttatggctgtatagtattccatggtgtatatgtgccacattttcttaatccagtctatcattgttggacatttgggttggttccaggtctttgctattgtgaatagtgccgcaataaacatacgcatgcatgtgtctttatagcagcatgatttataatcctttgggtctatacccagtaatgggatggctgagtcagatggtatttctagttctagatccctgaggaatcgccacactgtattccacaatggttgaaccagtttccagtcccaccaacagtgtaaaagtgttcctatttctccacatcctctccagcacctgttgtttcctgactttttaatgatcgccattctaactggtgtgagatggtatgtcattgtggttttgatttgcatttctctgatggccagtgatgatgagcattttttcatgtgtctgttggctgcataaatgtcttcttttgagaagtgcctgttcatgtcctttgcccacttgttgatggggttgttttttttttcttgtaaatttgtttgagttcattgtagattctggatattagccctttgtcagaggagtagattgcaaaaattttctcccattctgyaggttgcctgttgactctgatggtagtttcttttgctgtgcagaagctctttagtttaattagatcccatttgtcaattttggcttttgttgctattgcttttggtgttttagtcatgaagtccttgcccatgcctatgtcctgaatggtatcgcctaggttttcttctagggtttttatgattttaggtctaacatttaagtctttaatccatcttgaattaatttttgtataaggtgtaaggaagggatccagtttcagctttctacatatggctagccagttttcccagcaccatttgttgaatagggaatccttttcccatttcttgtgtttgtcaggtttgtcaaagatcagatggttgtagatgtgtggtattacttctgagggctctgttttgttccattgatctatatctctgttttggtaccagtaccatgctgttttaattaccgtagccttgtaatatagtttgaagtcaggtagcatgatgcctccagctttgttcttttggcttaggattgacttggcaatgtgggctcttttttggttccatatgaactttaaagtagttttttccaattctgtgaagaaagtcattggtagcttgatggggggatggcattgaatatataaattaccttgggcagtatggccattttcatgatattgattcttcctattcatgagcatggaatgttcttccatttgtttatatccttttttattttgttgagcagtggtttgtagttctccttgaagaggtccttcacatcccttgtaagttggattcctaggtattttattctctttgaagcaactgtgaatgggagttcactcatgatttggctctctgtttgtctgttattggtgtacaggaatgcttgtgatttttgcacattgattttgtatcctgagactttgctgaagttgcttatcagcttaaggagattttgggctgagacagtggggttttctagatatacaatcatgtcatctgcaaacagggacaatttgatttcctctttttctaattgaataccctttatttctttgtcctgcctgattgccctggccagaacttccaacgctatgttgaataggagtggtgagagagggcatccctgtcttgtgccagttttcaaagggaatgcttccagtttttgcccattcagtatgatattggctgtgggtttgtcatagatagctcttattattttgagatacgtcccatcagtacctaatttattgagagtttttagcatgaagggctgttcaattttgtcaaagrccttttctgcatctattgagataatcatgtggtttttgtctttggttctgtttatatgctgaattagatttattgatttgtgtatgttgaaccagtcttgcatcccagggatgaagcccacttaatcatggtggataagctttttgatgtgctgctggattcagtttgtcagtattttattaaggatttttgcgtcaatgttcatcagggatattggtctaaaattctctctttttgttgtgtctctgccaggctttggtatcaggatgatgctggcctcataaaatgagttagggaggattccctctttttctattgattggaatagtttcagaaggaatggtaccagctcctccttgtacctctggtagaattcggctgtgaatctgtctggtcctggactttttttggttggtaagctattaattattgcctcaatttcaaagcctgttattggtctattcagagattcaacttcttcctggttcattcttggaatggtgtatgtgtcgaggaatttatccttttcttctagattttctagtttatttgcgtagaggtgtttatagtattctctgatggtagtttgtatttctgtgggatcagtggtgatatctcctttatcattttttactgtgtctatttgattcttctctcttttcttctttattagtcttgctagcagtctatcaattttgttgattttttcaaaaaaccagctcctggattcattgatttttttgaagggttttttgtgtctctatgtccttcagttctgctctgttcttagttatttcttgccttctgctagcttttgaatgtgtttgctcttgcttctctagtccttttaattgtgatgttagggtgtgaattttagatctttcctgctttctcttgtggccatttagtgctataaatttccctctacacattgctttgaatgtgtcccagagattctggttcgttgtgtctttgttctcgttggtttcaaagaacatctttatttctgccttcatttcattatgtrcccagtagtcattcaggagcaggttgttgagtttccatgtagttgagcggttttgaatgagtttattactcctgagttctagtttgattgcactgtggtctgagagacagtttgttataatttctgttcttttacatttgctgaggaatgctttacttccaactatgtggtcaattttagagtaagtgcggtgtggtgctgaggagaatgtatattctgttgatttggggtggagagttctgtagatgtctattagatctgcttggtgcagagctgagttcaattcctggatatccttgttaactttctgtctcgttgagctgtctattgttgacagtgggtgttaaagtctcccattattattgtgtaggagtctaagtctctttgtaggtctctaaggacttgctttatgaatctgggtgctcctgtattgggtgcatgtatatttaagatagttagctcttcttgttgaattgatccctttcccattatgtaatggccttctttgtctcttttgatctttgttggtttaaagtctgttttatcagagactaggattgcaacccctgcctttttttgttttccttttgcttggtagatcttcctccatccctttattttgagtctatgtgtgtctctgcacatgcgacgggcttcctgagtacagcacattgatgagtcttgactctttatccaatttgccagtctgtgtcttttaattggagcatttagcccatttacatttaaggttaatattgttacttgtgaatttgatcctgtcattatgatgttagctggttagtttgctcgttagttgatgcagtttcttcctagcatcgatggttcttacaatttagcatgtttttgcagtggctggtaccggttgttcctttccatgtttagtgcttccttcaggagctcttgtagggcatgcctggtggtgacaaaatctctcagcatttgcttgtctgtaaagtattttatttctccttcacttatgaagcttagtttggctggatatgaaattctggttgaaaattcttttctttaagaatgttgaatattggcccccactctcttctggcttgcagagtttctgccgagagatccactgttagtctgatgggcttccctttgtgggtaacccgacctttctctctggctgcccttaacattatttccttcatttcaactttggtgaatctgacaattatgtgtcttggagttgctcttctcgaggagtatctttgttgctttctgtttttattctagggtatggcactcactacattttcatctttcatcctctcttccactgtgctgtttatctttttagcagttttattgaaatataatttttatatactgtacagttcactcatctaaagcttacaattcggtggctttcagtatcttcatagttgtgccctatggatatcaccacaactccaaatcagatttttgccttctgtttttattctagggtatggcattcactaagtttttatctttcgtctttcttccactgtgctgtttatctttttagcagctttgttgaaatataatttatatataccatacagttcactcatttaaagcttacaattcagtggcttttactagcttcatagttgtgcccatggatatcaccacaattttgaatattttcattgccccgtaaagaaaccctgtgcccttagtcatcagtctccattcttccctatcctcctcagccctatacaaccactaatcaaccttctgtctctatggacctattctgtgcatttcatataaatgaaattatataacatgtggtcctttgttttctttcacttagcataatgttttcaaggtttcattcttgttttaccatgtaaataaattcctttttattgccaaataacattccattgtatggatgtagtacattttaaattcattcattagttgatggacagttgggttgtttctctgcttgttagctgttatggataatgctgcttcgaatgtttatatacaaaatgttgtgtggacatatgttttcacttctcttgcatatgacttgggagtggaattgctagatcacatggtaactctgcatttaactgatagactgccagcctattttccaaagtggctatgacattttatactcctaccagcagtgtataagggtttcaatttcttcatattcttgtcaacacttgttattatcttttttattatatccattcttcgattcttagcatgtatgaagtggtctctcattttggttgctattccatttaaaaacttttttattatggaaattttgaagcatgaaaaaatgtagagttactcttcctttttttttttttttttttttttgagaaggaatctcactctgttgcccaggctggagtgcagtggcgcgatctctgctcactgcaagctccacctcccgggttcatgccattctcctgcctcagcctccggagtagctgggactactggcacccgccaccgcacccggctaatttttttgtatcttttagtagagacagggtttcaccgtgttagccaggacggtctcgatcctctgacctcgtgatccgcccgcctcggcctcccaaagtgctgggattacaggcgtgagtcaccgcgcccggcctactcttccattttttgctggagtattttaaaaccaatccagccgggtgtgttggctcatgccagtaatcccagcactctgggggggccgaggtggtcagaccacttgaggtcaggatttcaagaccagcctgaccaacatggtgaaaacccgtctctactaaaaatacaaaaattagcttggcgtggtggtgggaacctgtattcccacctacttgggaggctgaggcaggagaatcacttgaacctaggaggcagaggctacagtgagccgagatcacatcactgcactccaggctgagtgacagagcgagattccctatcaaaaacaaaaaacaatcctaggtattatcttgtctcacccataaatatatcaatatagatctctaacagataatacttttttttaaaaaaaaaccacaatgccattatcacactgaacttaataatttcttagtgtcatccaatacctagtcttttcaattttctttattatctagaagatgtgttttcatagttgattttttcatttcaagagccagataagatgtgcccatttggctgtcatgtctcttaaatcattttactttattttatttttgtattttttgtagagatggtgtttcaccatttgcccaggctggtcgcaaacttctgggctcaagcgatctgcccgccttggcctcccaaagtgctgagtttacaagcatgggacaccaagctcagctccttgaatcatcttagctgtaaaatcattcactttccctcatctgttttgtagacttctgcacattctggattttgctgattgtgtccccaggttttatttaccatgttcctttatctctcttatttcctttaaactgaaaagtgcatctattagtttgaagattaggttatagttcatttttgtgatagaggtgatgttaaaattcaacagtggattcaagtattgtcagcccatttcattcattatgatgttttcccatcagcctttcatctaatggttttagctgcaaataataatgactattttattagagtctgaaaaatgatgattttctttctttcttttatttatttatttttatttgagacagtcttactttgtcacccaggctggcgtgcagtggtgctgcagtctccgcctcctgagttcctcagcctcctgagtagctgagattacaggcgtgcactaccatgcctggctaatttttgtattttttttatagtgacagggtttcaccttgttgcccaggctggtctcaaactcctggcctcaagtgatctgcccacctcggcctcccaaagtgctgggatttcaggcggaagccactgtggctggtctgatagtctaattatattatcccttcagcatttattagctatgatttgtctataaaaaaaattttctcaatcccagcactttgggaggccgagacgggcggatcacgaggtcaggagatcgagaccatcctggctaacacagtgaaaccccgtctctactaaaaatacaaaaaattagccgggcgtgttggcaggtgcctgtagtcccagctacttgggaggctgaggcaggagattggcgtgaacccaggaggcggagcttgcagtgagctgagattgcaccactgccctccagcctgggcaacagagcgagactctgtctcaaaagaaaaaaaaaattttttttctgttaccagctattcagttcacagaaatatagtctgtataagaaaaacattctcttttatatttttagaataatgaactgttgcctcagcaacttctcaaggtgaccagtaagttattttcttttttaaatggaatattactatgtatttataaatttgggtatatttgataatgtatttcagcccattgcaatcattcttttttggagacagggtcttgctctgttgtccaggctggagtgcaatggcacaatcatagctcactacatcctggaatatctaggttcaagtgatcctcccagttcagcttcccaagtagcagagactacaggcacacatcaccgcacctagctagtttttaatttttttgtggaggtggggtcttgctatgttgcccaggctggacattctttttgatactaaaatgatctcatctttggttaatgggagtttcttcaagttggcttttttctcttctctttttctatttttatcatgaaaaaaatttaagtatacatacaaatacaggaataataaaaggaaacccatgtgtatacctacccctaagattcactaattattaagatttcatcatacttgctgcaaaatcattttaaaaatacaatatagagtctaacttttttattctacagtgtgtaacgtttcccatacacctcgtgggcctagaagtgctaatcaagactgatttgggcacctaccactttacagagttggattgtaccacactgtattacttttcctactcatgggcaattaggttttcactattataaatgcgtgctgcagtgaacatttctggacctgtttctctatgcttgtatttgacagagtctctgggtgtatatctggaaggatagttgcttggttgtaggatatgctctgttcaaccttagtagatattactaaattgctttctgaagtgattgtgccaatttacatttacccttttcctgtttcactgtttccttactgatacttgatgttatcagattttaaatttttgttaatctaacaagtatagaaattgttttaatttgtattttcctgtttattggtgagatttattcatttattcaccaaatcagttattacgcatcaggtaccatgcactattctgtgtttaatatacatcagtggttgaagatccctaccctcatggatcacataggcagaatcagacagtaagcaagaaatataataaatatagttgagtattagaaggtgagaagtgctataggggatttcttagtctatttggattgctataacaatgcaaactggatagcttataaacaacagagacttatttcttatagttctggaggatgggaagtctaaaatcaaggcactggcacattcattgtctggtgagggcccatttcctggttcatagacagcaccctgctgtgttctcatgtgatggaagcatgctctctggagcctcttttgtaagggtgcttatgccattcatgaagtctccacccttatgacctaatcatctcccaaaggccctacctcctagtaccatcacacaggtgaatttttggtgggggcaggggtggtgggatacaaacattcagactatagcagaggggtgtatattttttctccatgtaggtattatactacttttgttagatttttttccctaattgttgcaaatggtacattctaaaaattacattttctagttggttatcacattactattataagtaaatgctttgctgctcatctttttaaagtattgatcttactcatcaactcttattattaatagttctgatactttaaagattcccttagattttctgtgcgactaggttttgcatctttaaattacagtttttattctcctagtccttacgctttttctaagtgttgaattgtttatacattatttatatatattatatataatatacgtatataatatataatatacatatattaatataatatatattaatatatgtatataatataatatattatattatatattaatatatgtatatattatatwatattatatattaatatawgtatatataatataatatatattatatataatataatatatattatgtataatataatatatatattatatatatattatatatattttttcttagacagattcttactctttcacccaggctggagtgcagtggcactccagtgatccgcctgccttggactcccaaagtgctgggattacaggcgtgagccattgtgctgggcctgtttacgcatatatttttattaacagacttcattttttagacgttttagatttatagaaatattgagcagatatttatcccctcccccaccccatcttatagtttcccttattattaacatcttacattagtgtaactgcccaacgggttcaccttgtgtgctgcctattcagagctgatttatgaagacaggggaactgcagaggagaaagagtaattcactcagagccagctgtgcaggagactgcagttttattattactcaaatcagtctcctggagcattcgggcatcagagtttttaaagataatttgacaggtaggggtttgggaagtggggaatgctgattggttaggtcggagatggaatcatagcaggtagaagtgagtttttcttgctatcttctgttcctgggtgggatggcagaactggttgggccagatgggtggtgtcagctgattgatctagtgcagggtctgcaaaatatctcaagcacggatcttaggttttataatagtgatgttattcccagaagcaatttggggaggttcagactcttggagccagaggctgcatgacccctaaagtgatttctaatcttgtagctaatttgttagtcctgcaaaggcagactggtccccgggcaagaagggggtctttttggaaaatagctattatcaattttgtttcagagtcaaaaccatgaactgaattccttcccgaagttagttcagcctatgcccaggaatgaacaaggacagcttaatggttagaagcaagatggaactggttaggtctgatttctttcactgtcatactttccttagttatgatttttgcaaaggcagttttgttagtgtgatacatttgttacagttaatgaactaatattggtacattattattaactaaagagtattttttatttattttattaactaaaaaataaagctaaaattccatagtttattcagatttcctcagtttttaccttgagtcttttttgttatttcaggatctcatccaggatattgcattacacttagttgtcatgtctccttaggcttctcttggttgtagtattttctcagacttttcttgtttctcatgaccttttatttaaaacattcaatgcctaagacatctagtataatttttaacattgtaagagtggagagccttgtctgtcttctgactgtaaggggactgctttataagttttaaagtatgctgtttgccatggattttggtagatactctttatcagattaaggaaattctattttctttcttattttttaagcatttttgtcatgaaaaagtatggggttttatcacatctttttctgcatctgtttgatcacatagtttttctcttttgatctgtttaatatggtgaattatatgagtagattttcagatattgaactggcctagcatttaatacccacctggacaggctatatgtacatttatatgctaacacacatatgtgtgcacacatatacatacatattcacatatgaatattacacacacttatttaatatgatagatttggcctagtaatctattaattaggatttttgtctctatattcataaatgaaattggcctgtaattttcctttcttctactatccctgtctgttttttgtagacagattttgtagcttttttcttagctgtcttaacattattaattatactctagttggacttaagctttctgttttgggcctggaagagattcattaaatatagcttctgaaaatatctactctgatctcttaggtctgcattcttcttaatacttaaaattttgggattcctcatggttatgtctatgtactgtctacaaaaatcataattatttgtagtggctattatttataaccaagtccttttgttactttggagtggatctttgaccttcaagatgttttgaacctggctgggtgcagtggctcacacctgtaatcccagcactttgggaggctgaggcgggtggatcacctgaggtcaggagttcaaaaccagcctggccaacgtggtgaaacccccattttttatatttataaaaatataaatatttataaaaatatttatataaatatttataaaaatatttatataaatatttataaaaatatttatataaatatttataaaaatatttatataaatatttataaaaaatataaatattagccatgtttggtggctcacgcctgtaatcccagctactcgggaggctgaagcacaagaattgtttgaacccaggaggcgaaggttgcagtgagccgaaatagctccactgcactccagcctgggagaaagagtgagaatctgtatcaaaaaaaaaaaaaaaaaaaaaaaaaaaaaagatgttttgaacatttttgtgattggcaattttgctagtgctatcatattgtttacattgtacttgacttttcttattctccatggaaattagtaataacagtatctacctctgacatttgtaccatattctattgcttataaagtatattttatatacaaaaagtgttttgtattttggatcccaaccatttgaaatgctcttcaccactgatactcataagagtgttacgtacaacaccatcaacttttgtctggattattgcaataattatttaccctcatgttccctacagttcatctcatacagcagccagattgatcttttaaaagtataatcaaatcataattctctcatgcttaaaaccctaaagggcttctaagtacactagaaaagttcgaattcttaccatgatttacaaattctgttttgccagtgcctagaacaaggccttgcacgtagtggatactcaatcaatatttgttgagttaataagtaactcattcattggcagttttagagaagcattgacttgcctcagatctcatagcttatgaataagtgaccacgtcaggatgagaactccaaatctcatgtttgcaagttgcctggctgagttacatttttctaattatccaatggaccctgaaccagactattctcactgtcttccagactctgtgtacccctgttaatttgtttgtgcctttctctttctgttttgccttctaaatcgggcccatcctcaagatttggacataattcttttccttttatggaacattgtcttatgtcttcagtaccgtgtacttgtttttgtggtggttgtggtgggtgggatggcggaggttacagtgctagtgggagaggaactcttataaataccagatattgcaccacatgcttaggtaagcagttccacttatttcccatgtgaccttatgagcaaagaagcactattacttaaaaatgagaaaacagccccagacaggttttcacttgcatcacctgaatggggaaatcttctatacattagccccaggaaaactcagagggctgtgaaatattctaaggattctaaggccaaaccttctccagctgcctggcagagctaggtgggtgcccaggtgcccttggtcaggacagttcttcattatcctgctttatttagcctgtctcacttggccagggccataaccaatagtctggcctatatgtcaacatcacacagagaaaataggagcaggatgttctgtttctgttcaataaaaattttgtttccaaacactaaacctttttataggtagttgtgatttttttccctgtctttacttgggcttctgattgtatttatttatttattttctcctttctgcttctagtattctagtcaagaagaaagccagaggaagccattgcccactgctgccgcccagtgttgtaagtgagaaacttgtctatgaatctcttttaattgtagctttctgtcgcttctctgaacatgggttattctgagctggggagggtggagatgtcatgtgtgtaagcagaagatattcctgaagcacatctgttcaggcgcctttctctgatggctgtctatctattagctttagggagacgtttttcggttttgtatggggggagtagggctcatctttttttctacatttgttagcttctacccctggaggaatgatttaacyccctctatccctgtttacctgttattattctttaaggctcagtttaaatatcatcacttctgggtaatctttgtgctgttttctccttctcccaagtctaacttaggtctctcctgtgtgcttccattttactgtgtgcacatccatcatatgacatatatatatttctttgacatgaacacaaagttttaaaagacatagacattgttccattttatattctttgcatttggctcaacacctatgcatagtatacctcaataaaatttgataaatgattgacttatttctcctgagattgatttgtcaagatcacacagattaattattgaaatgagccatacgtttttggtatattgttaccctctccccagtttccctcaaaacagcttgagacactaaaggactgacttagagtctgatctatttcgctttttcaacctgtgatatgtgtgtgtgtgtgtgtgtgtagggggatgcgggggggggggattttgatacttttgtgttgctctgttttttctgaatctcatgccaaactccatcaactacaagttgaagatgatggtaatgattgtagcatttgttgttgtaatattagtaataataagaactgtaggctgggcatggttcccagcactttggaaggctgaggcaggaggatttcttgagcccaggagtctgagaccagtttgggcaacaaacagatacctcatttctacaaaaaaaaaaaaaaaaaaaaaaaaaaaaccaagtgtgatggcatgtgcctgtagtcccagatacttgggaggctgaggtgggaggatggcttgagcctgggaaatcgaggctgtagtgagctatgattgtgccactgcactgcagcctgggcaacagagcaagaccctgtttcaaaacaaacaaacaaacaaacaaaccatagcagctaacactattgaggtcttacagtatgccagatgccattctgagactttaagtattctaatttatttaaacttcacaacaaccctaagacagattttactgttgttcccatttttgagagcaggaaactgaagcataaatagattgagtaattcgccacaaatcacatagctagtaactggtgaagtaaatattcaaacacagaaaatctgacttagtagctcctacctctgtgtgaaccactgtgttatattgattccttcatattgtttctgaaaaggaaaacctttgtccatggtttgtgaatctgttggttgccttcaatttggtacattctataggcccactttcctgataaaagtaaaggccaatggtagaggtgaacttttttttctttatttaaagaaaacctatttttcatatgatttattactaacttttgttttttgctgtttaggaccgaacatttaaggtcataggaggtcagaagaatctgaatccaaaaccaggttttcaggtttacaggtccttttcaaaactcattgtaatgagttcattgtgattgatttaatcttttaaacctttttccacgactgctaatgagaagcaaaatgtaaagattgagattttacttcctactccttcctggtctcattgatgaaatataattgaagcgattaaagcgcaaatgccaagagggcaggaggaaataaaaaaccttaaataatcaagcaactttattcccatacatttttcatatgtttacaggctattttatttttctgtgaataagccattcttgtcttttgcctgctccctcgtatatttttattttgagaaatgttaaacctatagaaaagttgaaagaacagtaccaagagtgctcattaccctttactaggttcagtgacaagcattttgccagatttgctctttccctcatccccctcttatttttctctcatgtttctttatctctgtctccatacatacatacacaaaaatacaagtattttctgaatcatttgaatataagctgcacatgctataacacatcagcgtgtttctgctaagagctaggaaagtcaacataactgaaataccatgatcacaatcaagaaatttaagactgatacagtaatattgtctataatacagtctatattaagaactccctaattgtccccaaaaatattttgaaagctttttttatattttaaaaaattttatttattttttaatttttatgggtacatagtaggtatttatggaatacatgagtattttgatacgggcatacaatatgtartaatcacatcaaggtaaatggggtatccatcacctcaagcatttatcatttctttgtgttacaaatattccagttatactcttttagttatttaaaaatgtgtaataaattattgttgaccatagtcaccctattgtgctagcaaatactagatcttactcattctagataactatttttgtacgcattaacygtccctaatctcctcttacccctaactccccttcccagcctctgttaatcatccttctattctctgtctccatgaattcaattgttttaatttttagctcccacaaacgagtgagaacatgtgaagtttgtctttctgtgcctggcttatttcacacaacataatgtcctccagtttcatccatattgttgcaaatgacaggatctcattctttttttttatggataaatagtactacattgtgtttatgtactacattttccttttccattcatctgttgatggaagcttaggctgctttcaaatcttgcctattgcgaacattgctgcaacaaacataggagtgcagatatctctttgatatactttcatagccttcccccgccatgatctaatcaataaccatacatttcatttattgtcctgtctctttaacctaccttctttccttcattccttttcttttctttgttcttttctttctctctccttccttctttcctttcccttcctttcctttccttttccttttcctttcttttccttttctcttttcacttttctcttttttctttctttcctttcttgagaaggagtcttgctccatcatccaggctggagtgcagtggcatgatcttggctggctgtaagctttgcctcctgggttcaaccaattctcctgcctcagcctcctgagtagctagaactacaggccatgctaccactcccagctaatttttttgtatttttagtagagacagggtttcactatgttggccaggctgttcttgaactcctgacctccagtgatccgcccacctcagcctccaaaagtgctgggattacagacatgaaccaccgcacttggcctagtcttctttaatataataaaaaaaaatctggccacgcactgtggctcacacctgtaatcccaggactctgcaaggtggagacgggtggatcacttgagcccaggagttctagaccaatccgggcaacatggcaaaacatcatctttataaaaaaatacaaaaattagtcaggcatagtggtgcatacctgtagtcccagctacttgggagactgagccaggaggatcacctgagcctggggagattgaggctgcagtgagccgtgatcatgccactgcaccccagcctgggtaacagagtgagaccctgtctcaaaaaaaaccaaaccaaaccaatacaaaaacaaaactttgcctttttggtcatttatgatattgatctttttttatttacaaaaatagtttattctaattataatctctattcatatgggggtataccttcttacaggtttctgggaagcagtttagcaatatgtaccaagtctttgaataggaataggctttgactcagcagctgaatttctggaaatttatcctcagtcatcacagcagacaaagatatatgtgcaaagatgttcactgcagaattatttaagtagcaaaatttgaaaatgacttaatagttaaacagcagtaaaaaataatagtccttaagatagaatattatgcatttattaaaaatcatgctttgaataataggaacattttcatggaacttggtaaaaaaaaaaaaagtattacagttatccctcagtatacttgggggattgcttccaggacccctgcacgtacyaaaatccgtgcatactcaaattcctcacttggccctgaggaacccacctatatgaaaacttggccctctgtatatgcaggtttcacatcctgcattttctatctgtctcattgaaaaagatccataagaggactcatgcagttcaagcttatgttatttaagggtcaacttaaaaccctcagtgtgtgtgtgtgtttatgtatatatatacataagcaatttaagacttattgctgagaacttaattgtgtctaccccccatttatatattgaagcctcaacactcaatattattatatttggagacatggcctgtgaggaggtgataaaggttaagtgaggtcataatctgatagggctggtgccctcataagaagaagagatagcagagctccatccctaccaagtgaggacacagtaagaaggtagccatctgtaagccaggaagaaagccctcaccaggaattgaatcagctagccagccccttgatcttggactttctagcctccagaactgtgagaaataaatttctgttacttaagacacccagtctaagtgatttcgttaaggcaatccaagaagactactgcagattttggtactaagaggtggattgttgctgaaacaaataccaaaaaatttgcaagtagctttggaactgggtgatgggtagaggctggaagagttttgaggtgcatgctagaaaaaactgagatttccatgaaggggttattgttagaaatatggacatgaaaggtgattctggtgagggcttagaaagaaaagaggagagctacagagaaaacttccatcttagagaatgtgtaattaatcatgatcagaatgttggtatgagtgtagatattaaaggcaatttttgtgagatctcagatagaagcagttaataataataataaggaaataactggaagaaggatgatccttgttataaggtggcaaagaacttggctgaattgtgttctagtgttttgtagaaggtagaacctgagagcaattaaattgcatatttagcagaagaaatttctaagcaatgttttgaagatgtgatgtggctttcccttactgcttgtagtaaaatgcaagaggacagaaatgaatgaagaaagactgttggacttcttaggttctagaagactggaccatagagctatttgactgtgaatctgtgctattttccagggaaaggaaagaattaccctcaaaggtgacagaggtcatcagggctgcccccctcaccacagacctgggggcaaggtcatttacttcattatgtaagagggcaggcttatcacagtgaggcagctcctgaaaagccaaggaggcagatatatcaagccaaagagaattattcttgagtcttagatctaatggaattcaccttggtaggctttggacttgcttaggacctgtcaccccttcctttcttccctgtttctctcttttggaatgggaatgtctagcctatgtctgccctacgattgtattttggaagcacataacttgtctggtttcgcaggtttatagctggaaatgcatttcgctttaggatgactctttactcaagatcactcgtcttatttagatgataattagataagacttgggactttagactttgaagtggaaattgaatgagttaagacttggggctgttgggatggaatgaatgtatcttgtgtggataaagacatgaattatggggggctggggcagaattgtatgaacttgattgtgtcccctccaaattcatatgttgaagccctagtccccagtttgactgtatttggacataggacctgtgaggaagtgataaaagttaaatgaggtcataaggatggagccctaatctgacagggctggggcccatttaagaagaagagacaccagagcttgctctctccaccatgtgaggacacagcaaaaaggtgaccatctgcaagccaggaagagactgttcaccagaaaccaaaccttatgggaacattgaccttgggctttccagcctcagactgtgagaaaataaattgttgttgtttaagctccccagcctatggtattttgttatggcagcctgagcagatgtatacactatgtaaatgcatctatacaattataagaaaaattactaggaaaagaatgatcaaaatattaaccaaatttgtctctaggatatgggattgtggccttaaattttttttaatagttaaaagttattattggccaggcacagtggctcatgcttgtaatttcagcattttgggaggctgcagcgggaggatggcttaaggctgaagttcaagactagtccaagcaacatagtgagacccccatctctacaattaaaaacaaagttattattaagaaaagtaattgagttcttgttcattctttttcctttttttgcgatggagtctctctcactctgtcacccagactggagtgcagtgacacgatcttggctcacggcaacctccgtctccctggttcaagtgattctcctgcctcagcctccgagtagctgggaccacagtcatgtgtcatcacacccggctaatttttgtatttttgttggccaggctggtcttgaactcctgacctcaagtgatctgcctggcttggtctccaaaagtgctgggattataggcgttgagccaccaagcccagttgagtccttgttcttaacctgggtttgctgctctctctctgtgactttggaagtcatcccactgttaacttcagtttcttgaagtaataaatggaggtggtgttctagatgatctctaggacttttccagctgtagcacatcatatgactctattacttcctagtcctcagattccttcatgtggatggcccctccactacccagtgtgttaggatcaatcctctgcggccatttataagatgtttccaaagtattttcagaaatcactgggctactgctctaaagaaactctccctttgatacaagagttactgtggctggaagtggtggctcatgcctgtaatcccagcactttgggaggccaaggcaggagaatcacttgaggccagcagtttgaaaccagcctgggcaacatagcgagaccctgtctctatttaaaaataaataagtttaaaaagtaaaaaaataaaaggagttactctagccccagttatttggatatactcttaaaggtgatgggattctttaaaagtattgaggcaaactatctgcttttcccctttgtctcaggtcaagcctttctcttttagcattcagtaacaacattctgcattcacttttatcctgtgaagtttttgtctcatttggtaactgatatatttattttaaaatgttgtagggtaattattgtgatttattatgtccatctgttttttatcccccattttattaccatttctagcatttaggctgacttgtgcccatttcttgaaagaaaggwaaggcagagagcagaagaagtgatctttgtggttttaacttcccaaagcctaagattttaggagagtatgcaaagtgttctggacaaatattatgagagggagcagagtttcacctgaatctcccaatttctaagaagagcttcttttgacttgaatgagaggagagaaatgcaagagaatgaggagagaaagaaagaaagtgaccagggkagatacattgggaccttgtgtctgctttctgtgttagggcactggtgaagcagcaggagtcaaagaggggatggctaggtgttgtgtcttaggcagatggaccatcacaaagagattcctatgctccaagttgcacttgctccaaaatgagtcttgggctttctagaagtgggaaagtgagcctctggtcctattggaaccacttgggcaggaataagaaatgtctctctcagaagtgttctctgtgtccgagtgactaaggactggaggagacctggactatcttgatgaatgccagttcacaaagacacatccatgccatgggcagtcacttcactgcagtgtctttttaaaaattattatgctttaagttctgggttacatgtgcagaaacactgcagtatcttattcacatgctgtgtcagtattcagagcagtcttcatgggacaggggcaagacttaggttgagactgaaggatgaatatgtcttctaagagtgataacattagttttcctaggagacatattgatctctttgttggtggttgttgcctctctggctgatattgcttggttgttcctgccctctgaggtgtaggtgagtgctggctttctcaatggggtgcaggtgtgagtctccaaaggttacttttggggactccctggggtcttatgtgagtgattgctctggttcaacttcttttgtcctgctattgactactaccaaaagatgtacttagcttgttgctgctggtatcctgttacttagaggcttcttgaatggggaaatatcaagataactgggactcacccacattccacagaattcacatgacccatgggaactcaattattcttgccctgagaaacaaaggatataggcaagcagttccattctcttctctgtctcccagctctgcctcctctgttctttttggctgcttagaaaagtacacagttcacatcagcaagtctcctgtccaagcagacatccaacctgtctggctccactcccattcttgtaggcatccctaacctttgtgaattatgaagctcctcctcacttggattcagagcagaaaaacattcgtttttcccctccccaggaggtggagaggggaaggagtgacctctcttcaccaacaattgctctcccaaaggttgctgggtcccacattgacatagacattctacaagacagctgacaaggatctagttaaattgtcttaacaaaatttcctggttgggcacagtggctcacgcctgtaatcccagcactttgggaggctgaggcaggcagatcatgaggtcaagagatcgagaccatcctggctaacacagtgaaaccccatctatactaaaaatacaaaaaattagccaggtgtggtggcgggcacctgtaatcctagctactcgggaggctgaggcagaagaattgcttgaacccgtgagacggaggttgcggtgagccaagattgcaccactgtactccagcctgggcgacagagcgagactctgtctcggaaaaaatttcctaaaatctggatttgtctgattatttcctcgtaattagattcaggttactgcacagctgatgtcaatttgtccctttatttgtgatgctgatgttaattattagttcagatgatgttttccagatctctttgttgcaaagatatttttctcctttgtaactaagtgtgtagtggcagtgatactttgagactgtgtgtatactgcttttatttaaataaacttccatgcattagttttaggatgtattatgatcattgcctaaatttattattacactgtggttgcaaaatgatgattttctaattctgtcattcttttttaaaaggaaaaaatggtttctctatacttgcacaattctgacaccaagtatgttttccataccaagcaattctctgctaacatcaactgagtgtctcatgacttaattctgacactagagatgtggagttagtgcagaccctacaggttaagggctcagtcccacaagactgcctcccactttagagaccaatcataaatcccaggttactgcctgaacttctgaccaactggctataaactggagttcccacaagcccctcctcaggttcaataatttgctaggatggctcacagaacccaggaaaacagttaatttggtattaccgattgattaaaaggatattttaaaggatacaaacaaatagccagatgaaatgatacattggaggaagtccagaagggtctgagcacaggaacttctgtccctgtggagttttgggtgcactactctccctgtgggtgcatttttgttcaccagtgtggaaactctctaaacccctttggctggggttttcacggacacatcattatgtaagtatgattggttaaatcattgatcattgatgattaattggctcaaccttcagcccctcttttctccctggagtttgtggggtgggactgaaagttctaaccctctaatcacaaagttggttcttttggcaactagcctccatcctccaggagttatcacattagcattaactcaggtatgattgaaaggggcttactatgaataacaaaagacagtcttatccctatcactcaaggagttaaaagggttttagaagctctgtgccaagaactgcaggcagagaccaaatatttatttcttattgtgtcacactgttattatactgaacagttgccagtcttttgtaaagaagagctttccttcttcgcatacccccacccctcttttaaaatgagtatcactatggacacatgatttttttttttgaacccagtgttttgtaatcctgttctgccattttctttgatgctcaaattgtcctgaatttggcctatgggtgttccttttaactagatcctgtgtccttttgacatggccctatcattctttgaccacttccttccttccttagtacaaaatattccaagctcatcttgtactttgccttctcagtcctagaataagtcatttctccaatgaggctggttatttttagtggggaatggtatttaaaaatcaagatcttggcactagttttgctcgttgctacaggagggctcttgcttcttggctctttggatggaactagggaacacactatgttcttcatactggtatcaccaattaacaccctcatcacaaggttttcctggtctcctttcatatattctctctctctctatgtatatatatgtgtgtgtgtgtgtgtgtatgtatgtgtttgtgtattatgcacatatatatacacatatatacacacatgtgtatatacacacacatatacatgtatatcttccagtgagaacctctgttcccaagaacatcaaattatttattcatttgctgtgtcctgtaatgtacacaaacaaattttaggattaatatacccagtgctattatcaacaataagacaacagtctttaagattcttgaaagtttttttttaaccttagaatataaactcacataagattacaaaaccaccagcacaccaaaaatttaacaaaattttataatgtcatcagtrtctatcctatattcaaatatccccagttttcccccaaactttcttgtcctttttgcaccattgtagaagttaatcaaggttcacacattgcatttgtatgtggtgtgatttgagtgaagatcgtctttttgcatgtggatttccagttgtcctaagaccatttgttaaaaaggcattttcggccaggcacggtggctcatgcctgtaatcccagcactctgggaggccgaggcaggtggatcacgaggtcaggagatcgagaccatcctggccaacatggtgaaaccccatctctactaaaaatacaaaagttagctgggtgtggtggtgtacacctgtagtctcagctactcaggaggctgagacaggagaatggcttgaacctgggaggtggaggttttagtgagccgagattgcgccactgcactccagcctggatgacagagtgagactccatttcaaaaaaaaaaaaaaaaaaaaggacatttctccccccattaaattgcctctgcatctttgttaaaatcattcttactaccaccacatgttcccattactttccttccttttagcagattagattttatatattcacattagaaagtggatatactttcttttaggatatgttcttcagatgtggcctcagctgggagttggtagcagatgccaggagacgcatgyggctttttgcatgcttgagcctcagtacatcatgtttacttttgcaggtcttattgctcctcaatttatagagctgttctgaggctgtgcaatctgatttgcatatttgatacaaatcttgcaacaaatggtatcagtataatataaacatttagccacaaggctaaatggtcagaagttgagctagagggataaactggtctgttccttttccaaacatacctaaagtttctaaggtatttacacttcactcttcaataaggataatatttctacctatatcttgtcaaagaatgtagcaacacaccatgttgccataccagtctgactactactaaattcaacaactttctgctcttttcaatttttatacatgtctgccttgcccacccactgtattaatgacagtatcactggctacaattgagaattgaatcaaaagtgatttagcatgtgatgaaggtttggtgagatgactacttacatcgaaaccatcctggccaacgtggtgaaactgctagggtgtgtaaattagtacaacctttctaactcagtgattttacttctaggaagtattcaaggaaaataactagaggttcaaaggaagatttatgtataggttttatttataatagtgaaaaattacaaagaaaggaagaatggataattatggtatttccatatgatggaattgtatacttttacataaatttttaagatagaggaaatatttatgtgtataagttctaaaaaataggatcctaacctgattaagatgatctcagttatctaagaaataaattatatacatatgtacgtagaaaaaccacaaggaaatataatttttttgttttttttttttggttgtttcgttttgttttttttgtttttttttgtttttgttttttttttttgagatggagtctcactctgtcgtccaggctggagtgcagtggcagaatcttgggtcactgcaacctttgcctcctaggttcaagcaattctcctgcctcagcctctcgagtagctgggattacaggcacctaccaccacacgtggctaatttttgtatttttagtagagacagggtttcaccatgttggccaggctggcctcgaactcctgacctcaagtgatctacccacctcggcctcccaaagtgttgggattacaggcgtgagccaccacgcccggcctgttttattttttctttatactttattgtactttccagatttcctccaaagaacatgcatttgttttataataattttaaaagggataaatattttaaaataacccaagcctgacaatacagaagcaagttattgtagattcacttttttagtttgaatttgagacttagttgaatgataatttattgttgagattgacatagtttagttcaacaataccagtgattccttcactgaaaattccacgtagcttttagagttgcagtgtaccttttattaatgatatccctaaagcctcccttaactacttaccgtgtctgaaacaaaaagcttctggggtctatgttatttctatatgtattatgatctaaaagatagcttgaacttttgcttgagatatagcccaccttggagtttcaaagagatttttctggttatctattaagggtttgtttcactggttttcttacagtattgcctataattagtgatctatacaaatcataaaccaaaatgtcctgagtacgaatcattcttttaaattagtaaaacggcataacccaacatattgtttaaaaattttcttgaagaatgaatcagttcagaacagttggatgtgagtcatatcatgaataacaagtgaccaaacattcagaagcattgtcagtaatatactgcttagttgctgggttgtgacaaattatttgaccaccacaaacttcagaagaatttcttttaccagcatatccaaaagaggcatgtttaataaaattacttacctttcctcattttcaactcttactgtcaaatgtcctggtcctagtgtccattgcgttgatatttgttgattcttagatggcaagcagtaggttttcaatgctttccactagttttcagccattagacctgatattcatattcctagtgtgcaccatattcaaatactcctcttatagcctcttattattcttggtctccatctaaaactgttcactgccactctattacctgtcttatttctaatattctacctgttaggggaggcagagaaatgggtcattctgtatatgtaactaggtattccccacttggacgattaggttcctgcctgctctacaagtgatgatggtataatccccaactaaaatcaaccacaaaaaaaacgctaggcaggtactgccagtgcttctcttagtctcattttcacacctaccagaaacaagactagctttaggcctgtgggctgtgttggccgcctctcaatggaggctaggacttgctttcgtagttgggtcttatagactttaagtagaacaggaaatgttgtccactcgtttttggtccaggatacctttcttttattctggacccaccacagccagagggagctgacccaagtggcaattactgtgtcaaagcttgatcatgtagagtatgggactatcactccaccatttcatgccagagaacaccatcttgagaggatctagtgcttcctgaccatcagacctaactacctcgcacagctccaagtaaaaaagaagcctggttagaaatctggatctgtattacttattttccgtatgacagtagccaccatactgataacccctgcctatcaggagatatatctcttagagagctttgtggcctcgcactctcaactagtactagcattcttttcttttctttttttgtagaaatgggggtctcactatgttgcccaggctggtctcaaactcctggcctcaagctatcctctgccttagcctcccaaactgctgtgattacaggtgtgagccaccacacccagtcaagaatttgcatgtcttacagattcaagagcatatagtagattaatccatgttcctaataatgccttaaagagaaccagaatctctcaccataattgaattttgaagggacagaactcagaaaatctgtcctctgtatccccttataatgacatgttcttattctgtggcaggccctttgaagacattaggatggcctgctaggacttctgacagccttcataaagaatgccccacaatgaaatttgggggacaaatgccaaagataatcctgggagacctgagagattattgaactctctcctgatgcccaggttcctctgggacattgctaccttgggtttaattataaatgtatccacttcttgaagccataatataatatgtatgctgttcacttaaattcagggccctgtgagtgggctatttagtccctacaccagctggcctttggctgcatccaaattgcagtgctcccccataaaagagatgtccagctccataactttcccaatcattttttgtcatactgtgaaatcatacttcaatagatatcatgggtttggagctttttgttcagtgtcctctaggttaaaattctgcactctcaaagtcatttgtgatttaaagttgtagaatgtattggttttcttgttagttttgaattctttttttttcttttctttaccttggctggataaagttatgaattcttgatggccactttgcatggtattgtgaagagcagctcagagtctttttttctcccaagtctcccaaccagttatctttttctgcatcacttgtttctaggaaatgggtaaactagagttaaaactttggtcagcttgactcaaatgtctgtgttctttccgctataccaccaccctgtggtggcaaaaatctcatgggatataatttgccattcagaaatatgtgcttttcttacgtggctactgccctttgttttaattaaaattaattcatttattgaataggtaatatactttgtataggagttttaaaatattaaagggagtatagtaaaaagtctccctcctgttcctattccccagccacttgggtcttctccccagaggtaatcatcgttagcattttcttgtgaatcattcaagaggttttactgctgttcgaatatacaggtatatacattagagagatcttttgattattctttccatcctttgaattggttttatttactcattcatttattctgagatggagtctcgctttgttgcccaggttggagcgtagtggtgtgatctcggctcactgtgacctccgcctcctgggtttaagtgattccccttcctcaacctcctgagtagctgggattacaggcgcctgcaaccacacctggctaatttttgtagttttaatagagacagcgtttcacaatgttgactaggctggtcttgaactcctgacatcaaatgatctgcctgcctcagcctcccaaaatgctgggattacagtgagccactgtgcccggcctgaattggttttagagtaccaaatactacaataaaatgtccacagctaacttatagttgagatttgaatacttcttgatcagtgtcttttttgggttctcactctgttctaaggatttatttaaaagccacaggggctaggtgcaatggcttgtgcctgtaatcccagcactttgggaggctgaagtgggcaggttgtttgagctcaggagttcgagaccagcctgagcaacatgatgaaacccgatctctacaaaaaatacaaaaattagcctggtgtggtggtgtgtgcctgtagtcccagctacatgggaggctgaagcgggaggatcacttcagcccaggaagttgagactgcaatgagccaagattatgccactgcactccagcctgggtgacagagtgagagcctgtctcaaaaaaaaaaaaaaaaaaaggcatagggaatagatggtttattttattttccctgttgctttccatagcaaagatctgtttcccaaaatcctggccttgagtacaatagaaatgtttcctctgtctgcactcaccctcctagaatgactttcacacatttattcctgggtcaagaacttctgcagtttatgtccatagaatatgttagtttcctcactaattttgaattcgttgtggtcactttttgtggtgttgtgaagagttatttttttcctcttccaacatactgagtccctttcttattttaaactttgtaaaaaatagaaatacgtaacatgggtactataaaagtcttcaaatgattcagaaatgtgtaatatagaaagtgaaagtactcttcaatttccccctctattccactccgggataactagtcttcacagtttcgtgtatattcccccaacattttaatttttatttttaaaaaatgagtcaaaaatttaattatgcggtgtctttcaatgataattgttttccctcccacaaaggccaaattgttctttttgtctgaattacaaaagaataaatgtaaaatacaaaagttttagagcataataatgaaactaatacccattagcctaccactcatcattatcctttagtatagtttagtaatgtactcagaagtttttcttagatttatcatgctccctgagtgacagtgttttccttcatatgggactggtgaattgcaagtgtagggacatagtctttggtttcttagttttgctgtctgatatgttaggtactcagggagtgacgcttggttgtttgcccctgagggacctcatcccatccaggttttagggaaagacaatttaacctttagaggaaaaaaaacaatgatcattgaataagagtgtaatttgcagtattttctggaagatggcatcctttttctttgggttggaaatttactttctccagagcttgtagattgctagaaagcttctgtaattgtgactactagactcatattcaggcgattgagacatgagtttggcaatagctaaagctttgttggctatattgtaaggtaatttataagcattagaatgctcaggggtatccctagtagaaatgacattgaagcagatgccagacagagaactgtcatacttttccwaatttttcctgtgaagctttgagacttcagcattacagaaaagaaatccagagccctgaagtacaaaggagcttatccattatagagcttttcattttctcctttgcaaaggcttttatattttctcggggggttcttgttcttagtgagtagctatgtaaaccagggagtatatttgcagaggctaggaaagaattaatgggagaatgcaaaaacaatcaaaagatctgaatcacaacctagactcaagtccgaagaggtaaatatacaaagacagcaacttgaatatgtaatttataattacatattcacattgtgtacacagtaataccatggaaagtaccctcaatgggtacacagtaataccatggaaagtaccctcaatgggtacacagtaataccatggaaagaaggaaagtcccgaggtggcaaaggaataaataaatggttaagaatggcataaagtttgttcaagaaggctttccagaaacatatgtttagaaattacttttgaaagaactaatcgagatgtgttcattgaaatgagagattgttcacagtagtataaatgaaaagaatgaggagaggattacaaagatgcaggacacactggcttagagtacagtgatgtcatagttgtacttgctaatctgccagaggaaatgaatcctcttgttgttgttggccttcaaaaagccaagatgtacagggctcgcccagtttggcagattcatttctttgggagccttttctttcttttactccagatacgtagagtcctcattatcatctatcaccttctctctgtttaaatgtgtcgtagaattgaaagttttgagccgcttaagattttggtggctaaaattttgttgctgtgatggaagacctgtttctgtgaacactggaagcagaagagccttatgattactttttacttatttacccaggaccacatgccctgcaggaaaataggattgcatgaccagctggcctccactctgcagattcatccacttcttcaatgtcctctatttctccttctcatttttaaaatcccagaaggcataggtccccaggtcatatacttcttttgccaccttcttctacctttttgccactttttttttttgtctgagccttctatattggctcttgcattaaagcatcctaatcattctggagttccataggtagctgattcttgtttatcttataagtaggatattttccccattttattttattttttgaaaggaaacatgtgcataaggtacaaaattcgatgtaaaaatgtatgctatgaaaaacagctttttttctgtaccctgtcctttagccatacagtttctacccagaggtaaccactactgccatttactgtggatttctctagaaagagtttatgcattcacaaacatataaatatatattcccccacccccatgaatggtagtatgctatgaactgtgtttagtgtcttgctttttatcatataatatgtatgactacatgtagggaacaggttcataataatggacattttaaaaattgaggtgaaactcatgtagcataaaataaaccattttaaatatataatttagtgacatttagtacattcataaattgtagaaccattacctgtctagttccaaaacatttttatccccctcaaaggagacctcatacccattaaacggtcactctccattctctccacccctcaccgctggcaaccactgatctactttctgtctctatggatttacccattctcgatatttcacataaatggaatcatatagtattaggccttttgtgactggtttatttagcagcataatgtttttgaggtgcattcaccattgtggcatgtatcagtcctttatcccatcttatggctgaatactaattcattgtacagatataccatattttgtttatccattcatagttgatgaaatatgtttttttttaaaccacttttggctattgtgaatagtgctgctatgaacaacagtgtacaagtatttgaatagctgttttcagttcttttgggtatatactaggattagaatggctattaatgtacatttaagttgcttccagtatttgcagttacaatactgaaattgatattttatatacataattttatacatgtgtgaatatatctgttggatgaatagctaaaagtgcgattgctgggccaaagcattgtacatttaacaatgcatttgaattttgaaatatgttacagaattgcccactatggaggctgtactatttatattcccacttacaaagtatgagagtgcttcatctttccttagcttttaggaatagtcamccttcctacaaaattatattgcagagatggcacactgaggatagccataggcaaacagttcctgtgccatgattcactgagtctcctttctgcttgcctgcttatcctgtctttttctcctctaccatctgggccgtctgattttctgattccccaaaaagaggtcttgataactgggccttttgtttagtgtcctggtcaaagttcttcctctggtttaacttctgtctttctgcttacatgttaattttgggtaatcctttgatttcattttcaataataatattgtggaagtagagaggaaagtgctgaggtgacagaagaagaagcaaatggttgagaatggtataaagtttgttcaggaaggcattctagaaaagatgagtttcgagatgacttttgaagaagttatttgcaatgtaaagtttgaaaggagagattattcctagtaggataaatgaaaagtaggaagaaagggttcaaaaggtaacatactccatctcaccccactccccatgtcctggtcaaggtatctcttactggctggaacattctttttcctattaccttatcccattggggagtgggaagtaaaggatcagacagggtatagcttctggtacctccagtctaggactaagactctgagagacacgaaaatatactagttatggactccttagagtgagtgcacagggagtattattttagtggtaaggcagtgcaatgggtctaggactgtcagtaagggtgggtgatgagttttacactagatatgtggtatcagtggaagcagctgatattgatgctaattataggtgctggcaaactaaaaagaaaagagagaaactattacaatatggtttggctgataaaaataatgttaattgtagtcttctgactcatttatttatttctatcctggcttcctctaaaaagaaatttgaggtggttaattgcagtcattacatcaacttattataatttatgttcagttacaattatacacaattaaccatgttaaaaatgtcagattaatgtatcaaagtttcatttgctagcaacacttaggtgtctatgctgagtacagtgtgtgttgtatatgcataaaggtcagttattaccataaaagcgtggtcatctgatggcttcttgttataggtttcattgggaggctgaggcgggtggatcacgaggtcaggagatcgagaccatcctgaccaacatggtgaaaccctgtctctactaaaaaatacaaaaaattagctgggygtggtggcgtgcgcctgtagtcccagctactcaggaggctgaggcaggggaattgcttgaacctgggagacggaggttgcggtgagccgagatcacgccactgcactccagcctggtgacagagcaagactctatctcaaaaaaaaaaaaaaaaaattagctgggcatggtggcactttcctgtaatcgcagctactcgagaggcagaggtaggagaattgcttgaacgctaggggcagatgttgcagtgagctgagatcacaccactgcactcgagcctgggagtgagagactgtctcaaaaaaaaaaaaaaaagagagagaggaatgaaagtccctgacctcagggagctcaagtccagagaggaagaaacataagtagtaccatttgataagtgaatgggaacgtaagtacttgatattcaaggaatacagagaaagagaatgtaatacaaatttgggatggttaggaactgcttcccagaggaaatgatatctcaaacaaagtctgtagtttacattatggttctctctttgtattgtacattctatggattttgacaaatgtgtgatgacacatatccacccttatagtatagaatagttacgctgccctaaaaatcttctgtagtttacctattcatttctacctctccccagatccttggcataaattgagtcttaaaggatgagtagcagacagttaagtgaagaaggagaaaagagttcatagtacaaggacactaagatgaaaaagcatgacttaaggtaccttggggtactgcaagttgaaaattcttgatggcttcggtggagggaataagaagagtggggaagggtcagatgaggccagagagacacagagaactcatatcacaaagggcttgaatgccatagcaagctgtttatattttatcttgaaggcaagggggaacctttgatgactttatgcagaggaatgaaacaattagatagcagtgattatagtgatgtgagcagtttgctgcattaaaaatctttttaatggtagaatataacacagatatatagacaactttataaaacaaatgtttaaatgtattagtataaggtaggtaaaagatagacctttgccaaccaccccagaaagcctccatatgcctcttcccaatcacaaccccctcttccctaaaagtacctactatcccaacttttataataattactctcttcttgttctttatatgttgtcacccaagtatgtatctttaaacactagagtttgtttttgcttgttttcttgttttctctttttgatatgtcttacaattttttttgtttgttttgttttgttttgtttttgggatagtctcactctgtcacccaggctggagtgcagtggctgtgatctcggctcactgcaacctctgcctcctgggatcaagagattctcctgctttagcctcctgagtagctaggactacaggcacatgccaccacacccggataattttttttgtatttttagtagagatgggatttcaccatgttggccaggctggtctcgaactcctgacctcaggtgatctgcctgcctcagtctcccaaagtgatgggattacaggtgtgagccaccatgcctgatcatgtcttacaattattttttattctatgggttccccctccgtctcttgcttttttttccttacaatttgtttattgaagaaatcaggccatttgactatatggttttgtttgacttacagagttttttacattcccgattttgctcaaaacattcctataagtttagcttaacacactcttctgtcctttgtatttcctgtaaattgtagttgcacattgaagattgatgatattgatgccaggcatattccatagtttgagtatactataatttaaaattttttccccaatttgtagacatttggattgttccccagtttttgctgctaaaacacaatactatagtgagcaactttatacacttttttttgtaaacatgttcaaatgaatctcccatcctctattacacagtatgtatttttcctctatggcactttctcagtttgtatgattatttgattaatatttgttcccttctttaggccatacatttcatgagtatacccattgttcataggtattttcctttgatttattaatatgcttatctgtgtatccatagtacctttgcccaataaatattagttgaataaatgcatttctataagtggaatcattgggttaaagaatatatayatttataattttgttagacactatcaaattgtataaaaatattttacctatttatatttctgctgctggtacttattttcacatttagcctcactggcccactcaacaacaccgtgccccccacccacctcttcaccccctctcctcttttccttttgttactttcttctacaaacatttttttgacacttacattccaggttttgttctaggtgtttaggatatatcagagagcaaaacaaagatcctgggtgggaagaaatagacaattaacataataaggaaataatataggatgttagagagtgaaccaataaaagagtgaaaggcagttggtaatgctagaattggagttgagttgcaattttaaataaaattctgagtattggccacatgagaaggtgacatttcaatagagttgaaataggtgagggaattaacgtggctctctggggaaagagtgtgataggcagcgtgaacagctagttcaaaagctggtagctactgaaaaggagtaggaagagttttgctgggtcctgggaatgctgtttcttgatctgtgtgctggttacctgagtgtgttcacagtattcattgagcagtacaggccgggcgtggtgtttcacgcctgtaatcccagaactttgrgaggctgaggccgggggatcacttgaggtcaggagtttgagacaagcctggccaacatggtgaaatcccatctctactaaaaatacaaaaattagccaggcgtggtggcatgcgactgtagsctgtagtccagctacttgggaggctgaggcaggagaattgcctgaacccgggaggcagaggttacagtgagctgagatcatgtcactgcactccagcctggttgacagagcaagattctgtttcaaaaaaaccaaaaaaacaaaaacgttgagcagtacggttatgatttgtatatttttctctatcttatacttcagtagagcttgcatatttaaaaatattagtggatgttgaacatttcaaaatgcattaatagtacttaaccaattcatggatatttttctttgacttattaatataatgaatgcattaatcagtttctattaataaatcatctttgcctttctaaaatataacctacttggttatggtgaattattcttttactataatgctaggcttgatttgcttgtatttcattttggatttttctatctatatcacaagtaacgttggtgaatagttttttgttattctcctatgttagatttgaagtgttttccttaattataggttctttactactgtcttccgtagaaagagaagttctacagtacttaccgaatcaactgtctagaaaaagggaagagaataatttctagtgtttgagtttatggtccttatgagatacctggtaattactacaatttagtagttgataggtgagttcctgtcattgcctagacagatggctgttcacatggagtctggggcttaagtattccatcattttaatgtcatggaaacattagccagtactggactactaatgggtggtgtaacagttgcctgggggtgttttgtttgataattgtagaccttactttttaatgtgactatttctgatttcttacattttccactagaaacaagataaaatgtgcagaagaagcagcctgtgagtgtgttgctgtagcctagtcagccagcctaggggatggggataagtgcagaggtttaccttctaggaaagaggatgtactttcgtcttagaactgctagaattttttcactgtatgatgacattgaacttttcttcaggctcagtaggatagtgggtctggctgccttcttcctccattagcacaggagtattattcttctgtctgggagactgtggctttttcatataggaaattctatagctgtgtttttcgcaatgtaattcaagaatcattggcatgagagtcaccaagtttcttgttgaaaagccctttgaattagaatctctgtgagtagagtttaaaatttacattctaaacaagagcctcaagtaattattaaaattaaaagatggccaggcacatggttcactcctgtaatcccagcactttgggagcctgaggcaggtggattgcttgagcttgggagtttgagaccagcctgggcaacatggtgagaccccatctctacagaaaacaaaaattagtcgagtgtgatggcacgtgcctgtagtcccagcttctcaggaggctagggtaggaggattggttgaggcagcaatgagccatgattgtcactgcactccagcatgggtgacagggcaagacctggtttctaaaaacaaatttttaaaaagtccagtcaaatatctgtaataattcagaataattctgtaatctctaataattcataaggtaataagtttcttgataaggatagttaaatcttcaaggaaagcacaaaaggaaggagatttcagcagaattaactactaagtttgttgactgattggacatgggaaataaagaggaattttaagaatggtcctgtggtttctgatttcaaagtattgggagtttggtggttttggacatgaggtgtacttgctatactcccgtatttctagagaatttttaacactgtaaatacaatgccattaccactgggggctgtgatactgtgattttataataagaaacatatattttggtctttgtccctggttcctgacacagagctcctaatctcttagaattttatggatactaggaatgtctgttgttctaatgagggactcttgatgggcttccacataggaaccagttatcagacagaccaagccatgtttggaagcttggaactttttttttttttttttttttttgagatggagtttcactctgtcacccaggctggagtgcagtggctgtgatcttggctcactgcaacctccacctcccaagttcaagtgattctcctgccttagcctcccaagtagctgggattacaggtgcctgccaccatgcttggctaatttttgtatttttagtagagaagaggtttcactatgttggccaggctggtctcgaactcctgacctcaaatgatccacccaccttggcctcccaagaagcctggaaattttagccccattccctttccttcaggaaagggagaggaactggagattgagttaataattgatcatgccaggtcaggcacagtggctcctgtctgtaatcccagcactttgggaggctgaagcagtaggatgactccagaagcttgagaccagcctggacaacatagtgaggccctgtttctacaaaaaaataataccactaatactacttataatagattgtgtctatatgataaagcctccataaaaatcccaaaactgtggatttttggagcctctgtgttggcaaacacatccgtgtgctgggagggtggtgcatcgcaaatccacagggcagaagctcctgtgcccaggactcttccagaccttgttctgtgtatttcttcatgtggctgttcaactatgtcctttgtaatatcctctaccgtagacgggtaaacataagtaaaatgtttcgttgaattctgtgagttgtcctgcctcagcctcccatgtagctgggaccacaagcctgcaccaccatgcccagctaactttttggttttgcctgtttttgaacttgttataagttatcataaattatctttcctttagagttagtttcatttctttttctttctttctttctttctttttttttttttgagttggagtcttaatctgttgcctaggctggagtgcattggcatgatcacggctcactgcaacaaccagctcctgggttcaagtgattctcctgcctcagtctcccgagtagctgggattacaggtgcccatcgccatgcctggctaatttttgtatttttagtagagacaggtttcaccatgttggccaggctagtctcgaactcctgacctcaggtgatctgcccacctcaacctcccaaagtgctgggattacaggcaagagccaccatgcccgacttcactgtgcattctcgctaacaatgtacaagagttccagttgctccacagcctcactgacgctttggattgtcaattgttcctcttcctcctcctccttctcttcctctttttcttcttctttttaaaatttctgtctgctttttaaatgtgattgttccttagggttcccccacttcatatagtctttttttcttggcctgcactctgccttagtgtttttatttacttgcatttttatttatactcatttgtaaatattggttgaacttttacattgtgccatgcattatcaggtgctgaggatacagcaaaagaacaaagcagaaaaatccctgcccttattggaacatatagtctgaaaacttccaagtctgttccacatctctttcctgagctccacacccgtatatctggctgtctactggccatgttcatttgagatgttccatagatatctcagagtcaatatacctaaccctgaattaatcatcttcttcagcctgcccccatgttgtatttttttctcggtgaatgatgtcacattcatccagtagctcaagctaaaaacctaagcaatattatttaatcctcctttccacattttatttactcattaaatgctattgattttccctccagaatatcttatgaatctatccccttctctctacccactctgccacttccctagtccaggctatcaacagatgagtgcaccattctccttacgagcctccctgacacctcctccctatgaatcaccagtcctttctacccaaccaaccaccattggccacactgttccactgttctctttctaaaatgccaaatctgatcctgtctttcccctcttaaaagctctgatagctctgtgttgccctccaggtaattccaaatccttaatattacttgatttctaaacattacctaagacccatagtcattaggttctttcataactctgtagcctctcactctagatattctggaactattttcagctcactgaacatgcctttgcatgcataatttccttttcctgggacattttccccttccttttctcagtactaatgcctagcaaaacctaactatcctcagtaattgttctgctggctagttatgtgttttaatgcatttttgggatagggaaggaaacttgcttatttaaaccggtgtaatttatcttatgacggttctgagctaaagtggtgagaatatggagctggcttgtcagagaacatgacttgttttttcatgcgttagagatgggcccagtagatgggatcagattattcattcaatttattagtacagtagatatttactgagaacttttatgtataagaaactgctgtggggtgctcaaagatgaggggcagtgtcctgcccagaaaggcttctttgggctcacaattgtggtgagaaacagcattgtcacttgcctggagcaatctaagttgatagacatattctgaggttctatgtgatttttttttccattttctttttaaaagaaatgaagtaattaccctctagcagttgctatggcaactgttctacaggagagtttttttttttgcctcccctccccccatggttagaaagtgaaataaattattacaattttaaaatggcacactaagccaacatatcctttctgagaggtgagaagaagagacataggtggtcggaataaagtaagtgcctaggaagaaaattggctgtcagggtatcactaaattaaagtctgtgattgattagtagtcccgtatgcccaggattgaggattagctcaagtactgaaaacagcctgggttggcatcatatgatgttcctagaatttcgagtcttactgtagactttcaagggagtcacacactcagaaccagtttgtgggccttgtggaccccacattgaagattccttagcagaccttgggactgtcagagggtgcaattctaggagttgtgtctttttttctgcttcttatttattaggactctgtaaggcaagcaaaaacctggtaacgtgacaaaataacaacaaatgctagttgctcaccatcttccagggactgtgcctagcattttacatattttttcctgtataatctttacagtaacccagtgacacttgtgttattgttattctcatattacagatgaggaaatatctgtaataactttctcaagatcatatagctagtaaatcgcagagccagaagaactgaatgttgactttaaaacccatattcttggctgagcatggtggctcactcctgtaatcccagcactttgggaggctgaggcgggtggatcactggaggttaggagttcgaggccagcctggccaacatggtgaaaccctgtctctactgaaaatacaaaaattagccaggcgtgttggtaggcgcctgtaatcccagcttcttgggagcctgaggcatgagaatcacttgaacctggggacagaggttgcagtgagccgagatcgtgtcaccgcactccaacctgggtgacagagtgagactctgtctcaaaaaataaaaaacccatattcttaattatgaagctatttacttcttgtttcttgagattaaaggcctatttttaatgatttctttatcacaattagtttcttgaaattcaatttgggtgtgggataggacttaattaatagtggatttttgattttgaaaaatgaataaaaaatattttcaattttctcctgtccttcaaagcttctgtgttttagtggattttattaaaartttataggtaattcagaagaagtggctctctttaaggacccaataggctagagtggtttattacatattgttttaagcccctttctgatctaggtctctctcagaacaccatcatttaggagctcatatgtctttcctttgtcaaaataagaaaaattagatctctgtctctaagaaacccttccttgtctctgcgttcaccaaacctgagcctatcacaataaatctatgagaagctaagccctgataccatgggtaagggagtctgggagcttaattagaagattaatttcttaagagataaacattgccattctttgaccttttaactttcagtagagaacagcaaaattgactatcttcgctcccagacaagggaattactcccttacccatggtatcagggcttagcttctcatagatttattgtgatgggctcaggtttggtgaacacagagataaggaagggtttcttagagacagagatctaatttttcttattttgacaaaggaaagacatgagctcctaaatgatggtgttctgagagagacctagaccagaagggggcttaaaacaatatggaagaagtaattttttgttgttgttgttctgtgggttttttgggttgttgttagtctctctctatagtgaaaggcagagaacaagaatactttgtagatttgtctcacatttggtagaaggcagaaactctatgttatgtaaagttagtagaatacaagtgaggtaggcttaagtaaggtaaggcacataataattgctgagatggggaaatgacttttgaattccttcaaaaaagtattttcaaaaattatctgctgcttctttgtggttttcttaggtcactggacctatttgggctggggagaacaacagagtacgtaagaattgaaattccttatcattttcttgatcttacccacaaagtacatactccctctgaactgtgaagctggatattcatgcatagacttccatttccctctcctctcctacttaaatatcgggagacaatgacctgtggtggaatgttatatcctttcaggctggtttcttgacgactttgtgtgtgtttaygtgtgttacaaatttcaaaccaaagtcccagtcataatcctgacaagatctcctaatttttattccccagaggcaagtagtagcatcagccccctagtgtggccttctcctttggtccctttggctaaggagtgcagtgaccagaaggagaaggttcattctaggatgaacyagagtcaaggtgattggtgtgcattctgatttggctgattttcttgactaggaggatatgcagaacagactgctgtcttgggtttattggtctagcaaattgtgaatgccatttcagccaaaaacctgcttttgttaaggaaacaagaggctgaggacatggcttggctttccctgaagcagcccagctaaggccacctttgttctagagcttagagagtgggcagccagttctttgtggcaaaacatgtagccctaggctgacattactggttgtgttacccatcttacaggatctggttgagtctcagtgattaggtatccagtaggtactaagacgggccaaagtttgtcctgtcactggaatttctcatgaagtctgtgctttctgtgatttgaatcctgagtacttctgctattaggaaagtactcaaaagcagcttgacccatttatgcctagtgttccattattggaactctaagcatgtgggagttatttatatcctactgctcaaggtcatcgccaagcagtaggtgacctcaagcataaattgcaacctcaggcataaatgggttaacagagctcaggtaagttaaggttttcaagtagaaaaagcaactaagccatgaaaaaaatgtgaatgaattttctttcctttctttggttgctgaagttctattaataggtgtgctgtggatttaaagaccaatccaagactcaatccaggaataccacatactagagggcctcatttttctgtatttcactggattttgtttgagtgcctgctgtgtgcttggaggcccatctttgtttgccccaggttagatgaccttcccagcctacttttgcaggtttttaattttccataatttcctctatgtctttttatttacctatcaaatgaactacaaaatggtttctcaaaaatatatagcctttcctaccactgggcctttcatcatgccactgcttttatccaaattctagaagatatttcccttctgcctccaatcttcacctattaaaaatgaaccaattcttcaaagccatctcctccttaaagcttccttagttaccctatcaggaagtgattttacttttaattcatagcacttggtttgtactaactgccttgcatagcaattcaatatttgtgtctatatattctgtctcctattagactgactctatattctgagtcttctgtgttgtttagctttggatatgtaggcagtcagtgaatatttgagtgagtaggtgttcccagccttttaattttccatctttcaaatagactttaccaggggcttttcaactgttaccctcaaactggctctctagttccttcttaggctgagccaaccaaacctgcactcagtttctctctgcaaagccagggcttttctcgtctagccgacatggtgctgtgggatagattatggaggcagtaagagatcgtcagtgacacattaaaaacacagttatttaattcaaattgaagtgttacatattttcctgaatttccctttttagtttctaatcaggcttggtgccaggaggtttactttttaggaaaactggaggtgattgcctctcactacttttttctgtttctctcctttgtctcactttattccttastatattctctctcttgccctctcctgcttttcatattctcttctactcccaacctcttctttccatggatgctttgtttcttaatatttgccctttatttctttagtgtagaaatgttgttagcctttagtaaagttgtagagtatctctgtttagcctagcaaaataaacaaaaagcagactattatttaggagtaataggtcacatgcagggagaaagtaaaacctgtggatttgggttgtgggcttctaactctggctgagctgccctctctggcctcaaaagtgataggattgtctgtcgcagttgcctccttggagactgaatcttgtttctctgggttatgtgctaatacttttcctgccagagtttagtagacctctggttttgtctcctttgttgcctctgccccttcatctgtatgcatgaatagtccagcactgacttctacagacttgctctttctgtgggttcagaaagaattaagtctgagtggcatatggttttgtctctgggtcctatttttcttgtcttcagaacaacagatgcatcaagggctaaaaacagtgcttccaaagtctctttttcttaatatatcatcagaatgctttgtaagcagaatgctttgcatccctcttgtttgcttttgttttcaagctttgctactcctgccctggtcagtggactacttgctccaaatgtcaagtattaactaatacttgttcctgaccatttgaacattagcttctttctcatgttgatatttttcctcccggagttctaatccctctcctctccttttttatgttcacatgtaaccataaactcaaatargaaaagctcataagatcatcttacccctgtctcccatctgtacccacaaatgttattgagagtccaatgctcagattttcttccttacctataaaacccacatgtttgtgctctcttttagtggaattcttatctaccaacttgtctaatgaagccaaggggggtcatttccctattatcttcaatatggccccatgttttacaattctgtctggaattttctttttctagttcattaactcttttctgtttccgctgtatagatgcaggtccttatctcctgcctgagcaattgtaaaagcctaatcttacggtcttcaggaggtttccactgcccacattgctacaagattatctttttttttttttgagacggagccttgctctgtcgcccaggctggaatgcaatggcatgatcttagctcactgcaacttccaccctctgggttcaagcgattcttccgcctaagcctccctagtagctaggattacaggcatctgccatcatgcccggctaatttttgtatttttatagagatggggttccaccatgttggccaggctggtcttgaactcctgacctcaggtgatccacctgccttggactcccaaagtgctgggattacaggtgggagccaccgcgcctggccccaagataatcttttaaaattactaacatgagttcattttgtgctaaaagtatctccattttgggatggtgaacattccttttcctcattgtaagccaaataggaacttgtcaagaaaggacacgtggaaccctgttaatcatacacataagggtatggtgtcagatacgacttcctctctgtaaaacaggcttcaaagcactcttaggttgagctccctttccaagcacagcgatgatttgtaagtgtggtctttttagttaactttaacaaaaaaactgtagccagtcaggtgctggtctgaaggacaaataattctacgaaattgtagtcactgctgttggataaacttggctgcattgtcagcaagatcccattggcagtgcataagttttttcttctctcagcccatcctctggatgggaattctgagcctagggtgtaggtgcttgacaggaattgttaggaaaagctaacactgcagcagcacagtaagagtgctgctgttctcagctgcatctagagcctttgacttgatttccaggccttggctttgaccttcctgatttccaggaccagcttctgatgttagacctgcttatttggttcaatccatatgtttaaaagtctgaaaacaccaagacaacgttaaataaaagttttggggtttttttccccaagatatgaaaaagckaacttttttaaacctctgctcctttcccctttctttaataacaggggaccagactgtatttgtgacatttaaaagcagtttttaattatggttatgatagttggagaagcagaattccaaagaattctacagtgggaaaatgcaacctagagctcctctaagaataagcactaaaattaaactaagtatatatctcatatgataaggaagagaaacttgtgggtattaattgagacagttctgctcatggctctgaggtcgtcactgggctcatgtgaagctcagcttgcttttgttctcaaggtccagacttgttactactaagttagaagcagaaataattctgaagaactaaataaagctggggtgctttgattgaatgtgcttattccatagcttttgaagaccctgatagtgccgtcgatgaccgagatagtgactatcgcagtgagaccagcaacagcttcccacctccttaccatacagcttcccagcccaacgcttctgtgcaccagttccctgtgccggtgcgatcgccacagcagctgctacttcaaggcagttcccgggactcttgtaatgamtctatgcaaagttatgaccttgattatccagagcggcgggctatcaggtgggtattgagcacaaagtactttctcttcctaatatccaggtytcatgatgcaaytggcaagaagaatttggatgctttaacctgaagaggtagcgtaagtgtagcagtatcaccggccaaactacagtcattttgtgtagattattagtcttttttttcttccacatgtttatacattgccataaggaattttatgtttatatattgccataaggaatacttctcttcatgatcagtgattctcaactgatcagggcgatcccacttggggtgtatctgccccacttcctgactcagtgagtttgttataccctttgccaagattaaaaacagaaaaaatcacagattggatagtccttcttgcctaaatatttccctgggaactttagaagaaaaccagtatgatttcttatagcagattcagtatttttactggaactttgttttaatttattttatttcttaaatatataaaacaattatgtggttaaaaaatgtcaatacagcataaagagtttcccacccacacttaccttcctccaccccatcttcttcctgtttcataattcccttcctactgttgtttcttatgtatccttccatagactgttgtcatatatttatgagtataaaagcaagtacatacatatgtgctctcccctgccctaagattaaaaaaaatttcagacttaaagaaaatttggagacataattcaatgaaaacccatattcatgttgcctagatttaccagttgtgttaacattttaccacatttactttatctcattctccctaatatgtattcatatacacatacattttctctgaaccacttaaaaataagttgcagatattgtgttacttcatcagaaagtatttcagcatgttactcctaagaaaaagaactttatcttatataacctcaatatcatgatcacactcaagaagtttaatgatgcaatgttattacctaatgtttagaccatatttaaatttctccagttatctccataatgttctgtatgtatatttgttcctttctggtccaggatccaatccagaaccgtgatgcattgcatttggttttcatgtttccttagcttcctttaatttagcaaaaatttcattaccttggttttttggtcttttaagaagcttttttttttttttttgagacagagtctcactctgtctcccaggctggagtgcagtggcgtgatctcggctcactacaacctcagcatccccggttcaagtgattctcgtgcctcagcctccggagtagctgagactacaggtgcacgccaccatgcccggctaatttttgtatttttggtagagacggggtttcatcatgttggtcaagctggtctccatctcctggcctcaaacgatacgccttcctctgcttcccaaatggaattacaggcgtgagccaccgtgcctggcctaagacacattttttttttgaagagtgcaggccagttgttttgagaatgcctcttcgtttggttttgtctgattatttcttcatgtttagaatcaggttaaacgtttttggcaaaaatgctggatgtttccttcacatgcattcaggaagcacatactttgtcttttttttttttttttttttgagacggagtctcgctctttcgcccaggccggactgcagtggcgctatctcggctcacggcaagctccgcctcccgggttcacgccattctcctgcctcagcctcccgagtagctgggattacaggcacccgccaccgtgcccggctaattttttgtatttttagtagagacggggtttcactgtgttagccaggatggtctcgatctcctgacctcgtgattcayccacctcggcctcccaaagtgctgggattacaggcgtgagccaccgcgcccggcccctactttgtcttattattggtgatgtttagtttgatctcatggttaaaaaatttggtatatgccgtatttctccagtgtaaagtttcctcttctcctttgtaattaataatatctggagtgatacctgagactgtatcaatactctgtttccccaatagtcttttactcaatgatattagcatccattgatccgtgcctgaatcaattattttattgattggaggttagttttcaagaaatcattccaatttagcttatccttttagtttctaaaattcactagactggctaggtgcagtgactgatgcctataatcccagcactttgggaggccaaggcgggaggatcactggagtccaagagcttgagaccagcctgagaaatatagtgaaacctcatctctacaaaaaataaacaaaattagctggatgtggtggcgcatgcctatggtcctagctacttgggaggctgagttgggagagattgcttgagtctgggaggtcgaagctatagtatgccaagattgcaccactgcactccagcctggatgacagagcaagactctgtctcagtcaatcaatacaaaattcaccagaccataggatgatgtccttttcttgcccacctcaccaaactgctacatggtgagtttagacacagggtcttgcgttgttgctcaggccggtcttgaattcctgggttcaagtgatcctcctgccttggcctccgaaagtgcttggattacaggtgagagccactgcacctggccttctggaagatttttagtgactaagtgtctgctttgatcttgcttctgtttcctaaatgaatgcttttggatgttatatctataaagaacacactgaactmataagctcctagcctttaggttctttctccatccctaccttggtacacagaagaaggcagtctttaatctaagtgaaagaaagttcaggctatcttcagtattcattgttttaaggtgggcatgtagcttctgctgctataatcagtatagggaaagattttcttttcactgtgatcctcaatgcatatagcctttagatttcacaaacaacaaattataatgccttaggctgggcatggtggctcatgcctgtaattccagtagtttgggaggctgagggcgggtggatcacctgaggtcaggagttcaagaccagcctggccaacatggtgaaaacccacctctactaaaaatacaaaaattagctgggcctagtcgtgggtgcctgtagacccagctactcgggaggctgaggcaggagaattgcttgaacccaggaggcggacrttgcaatgagctgagaatgtgccattgcactccagcctgggcaacaagagcaaaactccgtctcaaaaaaaaattataaggccttaaataatttgttatttttttgtagtataacaaagtttgacttctgctgatagtaaaaaatggttttatatgtatttttttcttattaaaagaaatatgtttgactatattcttggctacacatcctcaaatataactttcagaaagttaacagcttggcttctttttagactaaaaatttatcagcaaatttcgttttcttgaaatcccttgatatattttgctggtatactttaatattgcaaatacattctagatattggtacaacatgtttcatttttttcatttgtttcttagaaaaataaaagaattctaaaaagctcaccaatgaaaaatgattgcaagttgaagcatttaaaaattgatattatagctgttctttttctcatatggaataaactatttgactacattgatataatatttaagaacatgtggatttccttttcatatttttttagtctgaatgctttttatcacattggcaattttattgttctagtcttctcattgaacatgtattaaatcttataacttctttcttccttttccctgtctcttcctttttctttgctttattgttcctccaattttatcccttcacatcagacaaggctcacaggctaaagatgaaaaaattaggattatttcagctttctctgatgttgactatgaagagcaagaagatatacataaggagatagaggggaaaatatcacaagagtttctagaaaataataacataaacttgaaggaagcagagataaaagaaattagaaccctttcaaaagctgataaatactacagccaacaaaaacaaccaaagtataagaacaggaaaaagataccacctcagagmcaacaaacagaattctctactgagtttaaggttgaaacttctgttttctccaggtatgctcagaaatatgatacactagatagaagaagaaaaaagaaatccttatacaatcattttgaagacagtgaaagaaggcaatatggtgagagatctgaaactaagactaactacaaaagtacatattctaatactgaaaattgtaccctttgccatactgaaaagaaacaaaatatggggtacccagttttgyacccctacaaaaatggatttgtggttaagagtggcatgcagcgcattaagttggaaagtcatgattatgatctgtccagttgtttaaggcactgtgaaaagtcatctggctcaaaccagcatgtcactaattttacctcattagatattcttgaagattctactagtagtacttctgatgaacttctgggttcccccatttctgataagcaggaaaatttacagtcaccaacatggcattcatccaatgtccaccatattggagattttcctgaggaatattatgtagcaaattcagcattgccattacaaaggatgaattgtgatgcaaaaacacttggagatctgtctgagtgctctatagaagagataaccccttcctctattgaggagcccaaggaggaccgtattgatacaatggatgagcttcagtgtttggtagaaacrgtgtcagaatatttagcagagaaggaagaggagattaatagatttggttcactttcaaaaactaaaaaatcacataaacaaaatagtactcttgatgcagaacagagaacgcctggggatcaaataccacctttaactattgtcaagaatgacaaggacacggccatctctttccctgagttgactggagtacaatgtgctgttggttctttgtttagttcactcacagaaaaagtgggttcaggcacaaagcatctaacaaactctgtggaaaagttggtttccttagttccagaaaaaacagaaactcttaatcaaatagaggcaattaattygggatctaaacccagagccatggcagtattggggaaggatctttccatgcaatctccattatcctctcaaaaagatgataatgtgaatatagacagacatagaaaaacctctgaaaatgagcacatgggtaataaaactgggagtttatactttcagaatacaacagaaagtattgcaaaggacttggctccacagagtcagagttcagttataaagtcggttttcagcaggttaaatccattgaagatcttttcagaaaaggaggaaacaaaaaaagatgatgaccagagtaagccaccaagaaaagaaagctttgttgagtgtggtttggagttaaataaaagggaaggcactcttgacaattacagtagtagcatcattgctttaaatgggagtgatgaagaaactacgggctggttccagatgcccacaagtgagaatttgttgtcctcccaagtaaccagtgaaccttcaaacttagttagttctgcaagtaaaaatgatgagagtctattggaagaaaaactctgtatagatctgtctcttttaccagatcaacaaaaaatatgtgccaaagatactccaggacatccttgtatagctggcagtagaactgcaaataaagaggtattttcaaagccattagaggaggacaaagttacaggtaatgatgatttccttgagccactcagaaaatcatttagccagtttttgctcacttcccctgagacttgttcaaaggaaagtttgtcagaacctgtgaaaattcgccaggtggaggaagatrgtttagaaaggggctctaagaaagatggtcrttccttttcctttagtggaaaactaaatcttccattttttagaagtcttggtcattctgaaaagcaacaggagttaaaagagaaaggaagcatttttccyttgtttaaattttctttcactgacagcaaggttactgttaatgaccagagtttacgtggctcagcagtaaccactgatgaggagagcaaaaaaaattgccatgaagataccaaacatagttcaataaaatctagttctgttccaaatattcatagtgatctaggaaaatttgacagtacagaggaatttaaaaagaatgaccagataaattgtcctgaagatgccaaacttaattcaataaaatctagttcagttccaaatattcatgatgatctagagaagtttgacagtataaaggaatttaataagaatgaccaagtaaattgtcctgaagatgccaaacttagttcaataaaatctggttcagctccaaatactcaggataatctagggaaatttgacagtacagaggaatttaatcagaatgaccaaataaatagtcctgaagatgccaaatttaatataataaagtctgattcagttacaaatattaataatgatctggggaaatttgggaatatagaggaattaaatccaagtgaccacacagcaggacagaattttgaaagggatggcttagccatccctggagttgtgcccaaagaacatataacttcagatcctttaggagaagataagaatcttatacaagcagcatcttcagtagcatcagactcttcattagagtgtatttctaccacttccaaatccactttggttaatgaaattaatgaagatgaggttatagataagacttccaagaaaaatacccaaggaagcttcctttctggcctgtttaataggttttcttctgctgaaaatttgtctagtcaagaattaaatttgaaaaatgatgactcccatcacaagaataataccccaggtttaatctctggaatatttaacctgctatcaaatagcggtatgattgatcataaaccagaggaagcaaagttcatgtctttaggcaacatgaagagtttgaatggagataaccatttatccttggatgaggtccctgctacttcatgtgtgacttctgagaacccgaagaaccatgttgaaaaacatgaaacttctagcttcatagaagcctccttattacctaaagaaaacataccattatctgatgctggggatgataatcattattgttcccctacagagaaaaaccagcaaagtgaaaagcatcacccctcctctgagaacattgtacttcactgtgctccaagtgctcagctaggttttttggagaaatctatggctaagaggcaaatgccaaaccatgttcttgaggcaaaactacatgaaaattcaaacaagttaaattcacctgtactaaataccaacattctcaataaatcaaacaactatcaggcttttgaagagatgaacagtcctttctgttttgaatgggactctgacataaaagatttgtctaaaaattccagaaaacttcagccagtttattatatgttaaatcaaaatagatttctatcagccgatgcttgcttgtggcttgactcagaaaactcagtgataaatttttgccaaaaagatcaaaatgcaaacatcttggagtggagaacaaatccaaacagtgtcatttggtgtgacttaccatatgaatcattcaatcagttagcatttaatgaagattacttattaagagrtgatgtgtgggcagctaactcattatatggaaactctggtcctcttccaattaatgaggctaataattcactagaagaattacccattgacttaagttcttcatcagatcatgaaaagactacatgccccgtagttgatcaagaatcattaagaatggatgaaaactttgttttttcaagttttggttatgagtaccaggaatggttgtcatgtcttgaacatggagtgtggtggccatcagaggatggggattatggatattatatgtttcatgatggtcaatatatctattctcttctcactgattctactgggcagtatgcatatttatttatacctgattcttatcaagagtatttggattgtgatttacagacaaatggtctatcaagtattacgttggatgacagcattatttctgcctgtagttttaaagtacttgataaggaagatgaaatattttggtatgttgaagaggaaccaattgatgaccctcttgatttatctttagctttgccaagaagtgaggaaccattgtatctaaatttagaaaccttttcacaagtacttaaagagtcaagttgtgaccaaagcgatcagccactagatttttcaggctataatcgtcaaaagtttaaaggagactttagatctttcaaagaaaggccgtgtggttctgaagacgctgaatgtacattagatctcagaaatcagccccaaactattagtaatcatgtctcaagcagagatcaaattatagagagagataaaaaccagcctctagctgaagattcatcagttcacctttccagtttccattggcttcagtcttctgttgaagaagttaccactttggttcatcctgaaaatatgactaaaggctcacaacaagcagaagagacatcattagtgaacaaagtggcttcagtattttctgttttgggtgcctcagttggwagtactttgaagtttgataagagtgaatccttagaggctttggccatgcagaaagtgaatcagcagtcagatttagcagagctcacaaatgatggctttcagtcattaatcatgagtaagcaattagagggtaactccccaaatgtggaaaaaagtcttcttaaggattcagaaagacagatagtatccaatgttcagcatccagaattgatcaaaaatataaggcaagaattctctttaaataaaaacaaccatgtgaaaaagcaaagtttgttaaaatctggtttccaggtaagccaaacaactcctcaggctaaatcaggtgtaaaagatgatgaaatcattacaacagactctatttcagtttctcctgcacctcagcatagtggggatgagcgtgagaattatgagcttccccagggccagtcatccaaagagtctgataaaacattatttaaaagttcattgaaactcttcagtcaagaagaatcgtcagttagtatgacagcaaatgaaaaacagtcatctggatttttgaatctttttaagactcaggtgaataaagaaggatcaccaaacttagaaaagattggtgatacaaatgtcaagataccacctcaagaaaagaaagaatcttctggtgtttcaaatttttggggtacccttggggatttctttaaagccaatgtatctcctatacagacaactgaaaatacgtctgtttcttcaatgactattaaggatgaggtcaggtcaagtcctactcctatggagctagctagccagggtgctgggaactttcctgctgcaccaatttcctctaaagggaaggctagagttagaagactgaacaaacagactactatcgatgacagtaggttagaggaatcaactagagggatccagggtaatgatttgactgaaaaagaggtaccattcagagaccatctaatccagcagtcacctaattcatctttttcaacaagtagtctcaaagagtcttccagggagtcttcagtagaaactagtggtgtgactacagtgacagaagtttcaaaaagtaatgaaatatcctttgataccctgagcaagagaaattcaaatgaacaagatcatttttctgacaaagactggagtttctctatggctgcaacatcttcatctcaaccagagttatcaaccaaaaagagtatattttcttttctcactggatctgaaaaatctgagaacagagcctctgctactctaccaagagccaaatctcaggcagaagggctattcacacttccttcatttttttccactgctagctcaagcattaagaaggatgcctctcatagtagttctacttttagtttcttcagcttgtcctttttggatcaaaaaaaggagacctctggggaaaaacaaagcatttcaactgttgttccagtgacctcccagcccygtaagaagacaaatgtttttgtagagagtggtagcacaatgaccagagaaagttccagtggtcatagagatagcatagcccaagaagtagttcatgaacagcaaatggcaccttgtatttccattaacaacaccattgaggttacctcccttgcagatgrgctcagtgtagacaaggactgtcaggaaaaactgagttccaatattgtaccagggacatcagtggatttccagatgaatgaattgcaaaaagacattattcctccttcaccagaatttcaggcacaggctgaaacattcctcactggcccagagaaccttgggatagctccccatgaagaagaggctttsaaccacaaagccttccccagtgactcactgtccaactctttttcacatgctaaacagttaattgaaaaattcaatgatttagacacttgtactaactgccaccaaaatgagaaatttactactgacccagtgaacttgccattagaaaaggcccccgatgaggtcttaccacagatcctagagccagcctcttcctctccagagccagggtgtgcagggaaccttcagaaccaagatgcagataaagaggaagacaaatttgcattaggctcttcagtagacatgctttcagggtttgtgaccaaagtgaaatctttctctgggagcttaattgaacctcccaaaacactctctggacttttctcctctcctaaatctccaaagaaaaactcctttttctctcttgcttctgatgtatcatctcagcccctcaaaggtgaattatttggaattttcaaaagtcccaagccagagccatacaaacaagaatcatctctcccagctacttcatggcttcaaaatggttgttccagagatgctgtaggatcagtacctccagaaaggagagaagctgcctttacagcactaagttcagaatctactctcagtgactgtagaatgactgtggttagtgcaaagccagaatcagatatcttgacagatgatcctaaactaacaaccaaaatggaagacaataatactcctgaaaatattctggaacctcaacgttctgaaacaattaatacatcttctttctcgggtgatgatactgggcaaggagtattgtctctgagtgatgaaggagacatggggatattgcaagctacagacacggaggcatcgttagaagcagagaactttgcgctgccagcacagttgcatccagatcctacctgcattgccgaagagcttcctcctccmattcagccacctcttcctcttgagccagagccagctattcaaactgcctccacaaaccaagacttactggagctgcatccagccagttcactagaaactgatactatgctgttcaatgatgcaagtgtgagccagagcaccactctggaaaccgaagggcacttttctcatcctctgctggaggaccctgtgcttgctgccagagaaagttgtgagataattcatgcccagaaagatccacctgtagtaccccaggaaacagagcagtcaagaccacgttttgagatcccaaatgtgaccacttggccaaagcttcgtttgccatcctctgctactaaccatgggaaaccactgagctctttcttttcctcacctctcccctctggcaatagagcagcagagactggtttaatgtccagttttaagaagttgtcaactctatttgagggaagtagtgaggggaaagggagtgtattagcaagtgattcaaaactaggatttggaaaggtagatctttcatttccatggccaaaagagaacaaaggggtccctgaacaaatgcctacagaatcctcccctccagttttagttactagcagtgatcaggaccttaactccagtgaggctaacaaagctttgaagtcttctcaaatatctggggccagtgctcagccaggtaaagtctacactcagccctctgggacctctgagcagctggtggccagtccagaggtctgtgctcaggggctttcagggtctggagaagggggaaaccagcaggaaatctcagcatctggagaacactgggataccaaagccaacctgtctagccccgcctgtccttcagggaaacatgaggaagaaccctccactgtctctgagatatttcaccagctagaaaaacaagaagaggaggcagtacctgccagtactgactctgatttgaatgtacagcagccagtcactctgaatgacatcaaggagcccatgaccaacaaaaggcctgttcttaactcaagcatcataaatggctttaaggaattgaccatttatgatgcaagtgacttagtggtagattaatcatagcttgctttttatccttcttgtgtctttcctagtacccgagcttcatgttaattaggggttaaataacaagaactcagtgtgtgggtattttcatcctccccttctctctctgccaaatgtaattcatttactggaacaaggagcttcctgcttaaagcaaaagctgggcccccgatatttactcactctggtttgctctgccttgtataatgtgaaatggagaaaggagggcaggaagaggtagtaagtagttggtggtatatattaactacaactacatgataggctaggatgcttccttgggccttaggcacttatatcttgtaggagatggggatagatctattttgctttgttttttcaagtcttctaagatgctttctccagtggcaatgagtgtattaagcaaaatacaaagtgcaaaggatgccttgggatagtctgtattcccatatcctattccatacagatttgcatagtttcttccatggtatcatctctgccttttactaccctcaaggctgatgtctgataaatgctttgagtaaaatctcacaggaactcagagctgtcctttgctgtagttcttcagtctcgagcagtgtacaggatctatctgcagagggtactgttatttcccctaagaagcagtaccatacagtacagattaagaatgctaccttgacctctggcccaaacttgttcaaaggggttggtcagggtcagtgtgtgtgtgtgtgtgtgtgtgtgtgtgtgtgtgtgtatacttatgtacaagtatatgtgtttgtgtgttgaactactcagaacagtgacctggtacctattctgctggcatgggctagaggatcagaaatcagcctgaaaataccaggtaattaggaggaactttagggaaaatcccattggaaaataacagtgatttctcttctttgaccaagggtaaacacaagccctttagttaaaggcttgactctgtggtaagaaaattcttcaaaagaactgaagcccttagatgacagggccataaaactcaaggaagtaacttctagatactgctcttctttccaccactctgcccttcttgccactgtcacattctctgctataactgctttctctcatgactttctggatatgggaatacaggtgattgagaaaagattggcttgctggtcttcagatatagagatgcatgaatacggctctgacccagatcctggagttggactttgtccactctttccaaaactgagccttgccctgaaagaagctcagttacagatgttcatctttgggacgcttcctatgctgccagggatatcattgtagcatttatgttgatgagaccattcgtttgtgtattctcttggtcctggcctctatcttccaatgggttctattaactcatcttgcagatgaggaaactgagatgataactgaaagaacatgtctgctctcctttgctcatcctaaggtacaggcgtacacatttacaattgtagaggaagaaatgatgacctcaatgtaataagtaatagaaaaagagtggagttcattcattccattttactgtgtggaaattaaagaaagattaatcacagccactggacaagcttctttagaagactgaataaagaattttaggaataagtaacaggccattttaataatttttaatcctactcacaaatagcctattaagataaaatatacttcaaagtcaagtgcagaactgaggttaagtgtcgttggagaacccagcatgttgtgttgttttcctgttgtgttttcgctgaatagagactaattcttctagattatgaagtttggtcctctcttcccaggaacctcctatttgattcttgctactaatgtagtcattatttcctggatgtctcctttcttttgtcctggtccctgattgcatttatttacttatctgtctttctgtcattctcacagccccaccagcagcagtaggtatggctcctcctgtaatgtgagtcaaggaagctctcagctaagtgaactagaccagtatcacgaacaagatgacgaccatcgggagacggactcgattcattcttgccacagctctcacagcctgtccagagatggccaagcaggttttggagaacaagagaaacccttggaggtgacaggtcaagcagagaaggaggcagcatgtgaacccaaggagatgaaagaagatgccacaacccaccctcccccagatctggtgctgcaaaaagaccacttcctaggtccccaggagaggtaggcaacagctgccttgaggagctcacatggcttcctcagtacctgccctgtggtattgctgaaaataagtgattgtcatttgtttccctgcagctgggtatggtggtagttaacacctccaggctcaactctgtattgcttcctttgatttatggtgcactttccaagacattttggagatctctgaagaatatttgggtttttgtttgtttgcttttgagatagggtctcactctgttgtccaggctggcacgatcttggctcactgcagcctcaacagcctggtctcaagcaattctcccacctcagcttcctgagtagctgggactactaggtgtgcaccaccacacctggctaattgtatgtttatagagacaaggtttcaccatgttgcccaggctggtcttgaactcctgagctcaagcaatccacctgcctcagactcccaaagtgctgggattacagcggtgtgccactgcacccagccagcacttgggttctttgtagttagtgagctgcagtgtaccagggcttcttgagtctgcagttcatagcttactagttgaccttgtatatggcagcctctgagtcaggaactgacttgagccaggttatttcatccactggggctgtggtaggtactttggctgacttcctaacctattaagaatgctactttgacctctggcccaaacttgttcaaaggggttggtcagggtcagtgtgtgtgcatgtacttatgtacaggtatatgtgtatgtgtgttgaagtactcagaacagtgacctggtacctattctgctggtatgggctagaggatcagaaatcagcctgaaaataccaggcaattaggaggaacttagggaaaatcccattggaaaataacagtgatttctgttgtaacttttttggtgaacattttgttttgtttttccctggctgagaaacccaggacagagttaagaaagaattgatctagaagtcagatttaacccacccctcagcctcctcagggcctagcaatgtgtctgccaattggtatccataggaagaaaaatttaaaatgtatcctctttaacatctcataatgaagctgagtacagagtctgaatgttattactgagctaaatcggttagactagctgataggttggagcagagccagagttctcagtctcggcactcgtgacattttgggccagattattctttgttgtgtatattataggatgtttaatagcatcactggcctctacacactagatgccagtagcaatccttgcaaccctcagttgtgacaattaaaactgtctcctgacagatttcccctggcggggacagttgcccactggggtagagtgataagggatgggtgtgacttagagtttcaaatttcaagatctaataataaagcctctcactgaaacaccagagcactgaatgcagattacatggtaaaaattagggagtgactggtgcttctactttaccactggattaatagatgagtcgcaaacctttctgaagatattaacttattttctctcttcttcccttttttggtttttggtcatctctggtarctcatctaatagatgggacatccaggaggtgagctgtggaccaggcttcttattgggttgatgactcactgaaaaactgactctggctctccatagaccttagacttggcagtcactgttatcagggcagagttcctggtggagaagcagaagtgcccagcacaagtccttgtccttctctactggttgtgtcctctcaggtcctagctgtgagagtgaaacccagttctaccttggccagaagtgcccacaaatgttttacaacagttgacacatttagttggcatcagaaacgaccatatattttaacatgtctagatggtggacacttgtctgctgaattggctgtagacctcaaagagagaaaggagaaacattgttgccaagaattaaccactattctagttaataatgtggataatgagttgttctaatgcagggtagtgtttctgtctcaaaggtattttgttatgtgtattgttcattttactgaggttgttctagaagcagctcaaggaacmagatcatggcagtaaaagggctgtgtgttttttttcttttctttcttggcacttttcatgtaaaaaggaatgggtaagccttctaaaatacttagtggagcaggaagggtttgcaggaacaaaattctgccctaaggatgctatgcaaaagccccaagggaactgatcgttttaagaagtgcagtgagaggggttgaaaggcttattccacccctctctgcatggtttctatactacgtattgactcagggctctygccattgcctctagagtcctgatcccagactgttccagggagctaccacattgggtaaatgacaaaaacgagtaggaaaagagggaacagatgaaaagctaaaaggaattgtcattttagagatgaattattttcacattgagtattcagtactatgctgctcattgggtaaatgaaaaagaaggaaaagaaggaacagatgaggcgcagtggctcacgcctgtaatcccagcactttgggaggccgaggtgagcagattgcttgtgctcaggagttcaagacaagcctgggcaacatggcgaaacatcgtctctacaaaaagtacagaaattagctgggtgtggtggcacgcacctgtagtcccagctatttggaaggctgaggtgggaggattgcctgagcccaggagattaaggctgcagtgagccgtgatcatgccacagcacttcagccgaggcaacagggtgagaccctgtctcaaaatwaataaataaataaataaataaataaataaataaataaataaataaataaaagagggaacagatgagaagctaaaaggagttatcgttttagagaggaattgttttcacattggatattcaagtactatgctgttttagtagcctgaatcactaaataagtgtaggcatgagtacaaaccattttattttagacatttggcagtcttgccttgagcagtgtcaccttgtggccttggctatttttaagaaatgtactttttctctgttacaagttttcctgaggagaatgcatcttcaccatttacccaagccagagcacattggatccgagcagttaccaaggttcgactccagctgcaggaggtaggaaatctgttctagtactggttgggacaatttttcctttgaaattgggagacatatggtgctggagaagcaatcagtgattagtcatcttcttacagtgtgcttctgggaatgcatgacaattaagccagagctttaagggatgggaagtggccagtggctttcttctgtgctgattaatggaaatcaaatagacctagtgggctgagagcctgactgtaaagttagatgcttattttcaagtactgttcattgtctctttgaagccgtttgagtttagggcgagtttagggcaagaaatgatttcaagcccctgaggatagttgtctcccttacctagccggtccatactggctcatctgtagggccaaaacagggtacaaaaatatctatggaatttgccagtttaagtcccaaagtatcagcacactaagatctgaaacaacgtcaaaaaaatgtaaaaacaaagataaatatttttcattttcagtgttacaagtttgaagtgtctttatctgtgtgttaggaggtaggcagtctttaggcagaaggtacttttttttccatataaatttaggaggtacccgtgcagttttgatacatggatatgttgcatagtggtgaagtctgggctttgggtgtagccatcatctgaatagtgtacattatacccattaagttatttctctttccttacccgcttccacccttctaagtctccagtgtctattattccacactctaaatccatgcgtacacattatttagctcccacttataagtgagaccatgcagtatcccatggtgtgtatatatatatatatacaccacatttttaaaagccaaacatctgttgatggacacttaggttgattccgtatcttttttttttttttttttttttttttttgagttcaggtcttgctcctttgcccagctggagtgcagtggtgtgatcattgcagctttgaactcctaggctcaagcaatcctcctacctgtgcctctttagtagcagggtctacaggcatgcaccaccatgcctggctaatttaaaaaaaawtttttttttttttttttgtagatgcagggtcttgctgtattgcccaggctggtcttgaactcctggcctgaagtgatcctcccactttggccttccaaagtgctgagagtacaggtgtgagccactatactcagcccataatatttttgctactgtgaatagtgctgcaataaacatatgggtgcaggtatctttttgatataatgatttattgaagttacatgtttaatgacaattggctgtcagtagtataatatctggcagatattaaaagcacaatcatgctcacatatgtgcacatatactttaaaaattaatttattttgaagcaatttcaaacttaaggaaaagttgcaaaaacagtaaagaactactatgtctcctcacccagatgctccaactattcacatttcacatttacttcattgccttccctccattatgatcaatctttttctgaatcatttgagagaaaattggagacatgatattctgtcattcctaaatcttcctttgtatttccctataaacaaggctacagttctgtataaccatgatataaccattcaaatctgccaaacaacaataacaacactattatcaagaccctatccatattttgccaaccatcccaacaatgtctctttttcctttctaatccagaatccaatccagaatgacaygttgcatttagtcgtgatatctctttagcttcgttcggtgtttcccatccttagcagttttaaatggtataggcttttcattttgtagcatgttcttcagtttgggtccattcagtgtttcctcatgtccggactgaggccatcctttcatggcaggaattacacaaaaaaaatgatgctgtgctcttttcagagcattgcgtcagaaagtacctgatgtcaacatgtcctaccatttataatgtcagccttgatgacttggttaagtttgcattggccaggtttctccactgtcaaggtaccatttcttccctctgtaattgttaagtgccttgtggtgcagtactctgaggatatgctggtattttgttccttatcaaatctctacctaccagctaagtagccgtctcctatctgaatctaccaccactaatgatggttgccaattggtaactttctgtttctattattctttctatattaattaattagttggcactctatttttaggaagagatttcccttttctctcattaatttatttatgtcaatattgcattatgactcttacatttctaatttattacatgagttataatccattattgtcatttattttggtgctcaaatcgttctggcttcatatgagcactcttaatttgacccttcagggagaagataatgttttagtaattattgaaaagatagctgcttggaaaaggtattgtgaatacagatatttgaaaatgctattatttgtatatagatgtgcgtgtgtgtgttcttttatcagaaacaatgttactgataaaaactcataattgcatgctctaaaatcttggaaagagactattaacatattaaaaatatttctaatgaagattttcaatgagttttgaacttacttgttaaaaatatgaaaatatttctcacaattttgcaagaacggctgactgacatcagagaagaggaaaaattactagccaaagtttaacaaaatctctgaataattagtatgttggaaccaattgctcttctttcattagatttgatatatcattatctttttcggctgtgacagctatgaaaaccatgtattgaagtaattgaatgtacaatcagaccttaaagtcattctataacaaaatattaaaataagatttaggaaacaattaggcacattatatcacattgttttaaaaaaaagtatcactgtgaatatttttagttacagcaaaaaaatttttgttaataaacattaaaaaacttttaaatttgttatgcttttcacattttaatttttataatatatattaatgcagttatacatctatataatttttaaatgaataagcgtacatatgttgagaggttcatgctaaaaaaattttccatggatagggctgcctaactgcaaacactgggagtctgttgatatagactgacgtgaggcaaacaaatgtttgtttatttatttattgagacagggtcttactctgtcgcttaggctggagtgcagtggcatgatcatagctcactgcagcgtcaacctcctgggctcaagtgatcctcccacctcagcctcccttgtagctaggactataggtacgcactaccacacccagctgattttttttaatgctttgtagagatggaatttcactgtgttgcccaggctggtcttgaacttctgaacttctgagctcaagcgatcctcctatctcagcctcctaaagtgctgggattataggcgtgagccactgcatctggctaaagaagcttttttttttttttttttttttaagacagagcctcactctgttgcccaggctggaatgcagtggtrtgatctcggctgattgtaatctccgcctcccaggttcaagcagttctcatgtctcagcctccctagtagctgggactacaggcgtgggccaccatgcctggctaattttttttttttttttttttaatttttagtagagatggggttttaccatgttggccaggctggtctcaaactcctgacctcaagtgatccacctggctcagcctcccaaaatgctgggattacaggcatragccaccacgcctggcctaaacaagcatttaaaatgaacatttatggaatgaatgtcataatacttactgattttttatttctaagttttttaaaagtaagggtcttgtaattcttcctataaagcaaagcaaagtaattagccttatccatgtaaaaggaaagctctgaattagaaaaataagaatatattggagaagacacagtttaagttatggccttttctttttcagaagtataataattcrgtctctcaaaaagactagctgaaaacagttgccaaagcttggaatcatacagacagaggcatggtttacctaagagtaactaagaacttaattgaataagagaacaatagtaaagatattcttaacacaggtaaagtaactggcaactgattagaaatgtccaagaggagaacaagaagccagagtttaaagagggttctgataacagtttaagattgaagcagaaatgtaccatttgtacttaagatgagatttagtaacatattggttgaagttatgtgagagaaagaagttaagcacaacaccaaggatttttttgccccgctgccgccccgccaccccaatcactccttcaccctccactcaagataatcttgttagtttcctatttatcgttctagaatatctgtctacaagtacaagcaaatatgaatatactaatgcttctttacccgtttttatacaaaagatggtatattatacataccaagcatttcttgattttgtatttggagatccttccatatcagctctaagaaaatttttcattcttttttatagctgcgtaatattccattgaatgaaatatttgttctgcaagtatttagtcctttgttgatgttcatttggttgtttccagtcatttgctgttaaccatgttacaaatgaataaccttgtacatatgtcattttgcatgtgtgcaggtataccaaggggatatgcatttataattttgataaatattgccaaattgccatccatttgtctatggcttaaaataacaagggcttgtttcttgctcgtattccacatcaaggagttttgctttaaagttgtcttctctctgcaatccaggctgatggagcaaccaacacctggaacactgccagtcacaatggtaaaaggaagggaaagataacaagtgaaagaaaatatagcaagttgtactttggctcttaaaacttctacccagaagttattaatacatatgttgcttttgctcatattttcctagctaaaggaaatcatgaaaccaaacttaactttttaaaaataatttcaacttctattaatattttagatacagagggctgagtgcagtggcttatgcctgtaatcccagcaggagtttgagaccagcctggccaacatggtgaaaccctcatccttaccaaaaatacaaaaattagccgggtgtggtggtgcatacctgtaatcccagctacttgggaggctgaggcaggagaattgcctgaacccgggaagcagaggttgcagtgggccaagctcatgccactgcactccaacctaggtgacagagtgagaccctatctcaaaaaaaaaaaaaaaaaaaaaaaaaaaaaaaaaattagatacaggggatacctgtgcaggtttgttacataggtattttgcatgatgctgagatttggggtatagatcctgtcacccatgtagtgaacatagtactcaggtagtttttcaatccctgccatcttcctccttcctccctctagtagtctacagtgtctattgttcccatatttatgagtacccaatgtttagatgccactcattttttaaaacttttttttttaattttatttttttgagatggggtctcactctgtcacccaggctggagtgcacgggcatgatcacagctcactgcaaccttaactcctgggctcaagcaacccttcacctcagcctcccaagtagctgggaccacaggcatgtgccacttatgcccagcaaattaaaaaattcttgtgtagagatagggtctcattatgtttcctaggctggtcttgaactcctggcctcaagcaatcctcttgtctcagactcccaaagtgctgggattacaggcatgattataggcctggcccctagctcccatttataaatgagaatatgcaatatatggttttctgttcctgcattaatttgcttaaaattatggcctccaactgcatccatgttgttgcaaaggacatttcactgttttttatggctgcatagtattccatgatgcatatgtaccacattttctttatccagtccactgttgatgggtacctaggttgatttgatgtctctgctattgtgaataatgctgcgatgaatatatgagggtatgtgtttttttggtagaacaatttgttttcttttcattatrtacccagtaatgggattgctgggttgaatgctagctctgttttaattaaagtggagcagtatgacatacttttaaagagatagagaaggatatttgtcartggctttaatgcctacccccaaaagtatatgcttcccatagggagtgtaccaatttatactcccactagtaatgtcttaagagtggttttctctttcctaacccatcagtaatgtatcaaacttttggattttcacttatctgctaggctctttttgctatcctgtttaggtgaaatgcttccaacatatagaattatttatatttcaaaaattctcagagactttatatttgctgtttcccatgcttagaatgctctttctcttaattcacttagctaacttttcattcacatcttttaaaacccagtcagctgtcagttttggggtaaagtttctagactctttgcatatttttttctactgcatgatgatgtaatggagttacttgtttactgctatgtcttacttttctgtgtacttcttgtaagatcctttaatgtcaggctaagctttttaaggctgatattcaagagcccagtatggaatctggcaaagtgtgtttagctaaccttttgtggatgcttaaccagccagagatgccccgcattatttccacagaagtctccatgtgcttctttatcttctaattaatactatttttaattattcccaaggcccagcacttaaagtcaataatagcagaatattaactattaacattagctatattttcttatataagctttatatacatgaacataaatttactgaatttagatcataatatgtgtggatttaaacattttttttctcactttgtttttgtgaactttattctgggttattaaatatttttgaaaacatgatttaatgacttaatagattaatattctcttatataggtattttataatattcctcttgtttctttcttttcttttttcttcttttcttttgagacagcgtcttgcctgggctggagtgcagtggtacaagcacagctcactgcagccttgaccttccaggctcaagtgatcctcccacctcagcctcccaagtagctgggactacaggcgtgtgccaccatgcccggctgatttatttcttgtagagatggagtcttcctatgttgcccagcctgatcttgaactcctgggctcaagcaattttcctgtctcaacctcccaaaatgctgggattacaggcatgagccctcatacctggctcctcttgttactattatgaataacgctgtgatgagcatcattgtgcatacatctgttttcatttctgattatttctttaacttaaaatagattaaattactgagttgaagggtataagtttttaaatttaaattttattttttatttttaattttattttttaaaatagagaccagktctcactacattgcctaggctggtcttgaactcttagcctcaggtgatcgtcctgtctgggcctcctgcaatgccatgattactggtatgagccatcacactcggcttcaggggtatatatatattttaagacttctgtcaaacttcttaatttattttcagaaaagcttttccrgtttgtactttcagtatttgagtgtgctgtaccaacattaagtattcttattttagaaaatttttgccaatttgacagaagaatggtataccattgtttaatttgcatttctttgattatctgtgatttgaatatatctcataagtttataggtcacttatacttcttcagctaatattacatcaaagagactttgagaatcatagaaacctagttacacttatgctattcctataagattgtcagtcacttgagggaagaggttatatagagtcatctctgtgtcttctgggctggctgagtacatggccatatgtacttaataagtgtttgatgacattgctattgctgatgaggcagtaatgttggtagtgtgggtgggagtggatatgaatctgtaccttatttggcttagctgcagaaaaatctgggggaggaggtgagactttagctctagaaacggagattgcggtggcagcgggtgggtgggtgttccaggtggaagggacagttcaggagaaggcatggagataggccaggaagaaggcttgacaggagctcttgggttgttgaagaaagctgaggaaggagagccttggtaagcagagacagaacagcaaatagatgagaaggcctgggtttaaatggagcagtctcaggagaggtaggattacagctgccagcctgagaggtagatcagcattttcttaggggcgatcattaagacagagaacgaatcgaaactcttctgcaaagttccgttctcacttgttactccctcccaagaaaagtgacttccttcttgttctataattgaagcctcaaaaatgggtccctaggggaaaaataatgaggcttaaggagagggcttttgagaactgcaccattcagactttgcaccagggaaatactctttccataatcttaaactctggaattttttctgatcatgtctgcctatcttaacttctcaactctttgccctcatggagactaccaatttccgatccctcctttttctcacaacttttcatccctctccctaaccattgccattctaacatttctaaaaaaaactgaagaatgttttgaataagtaataaatgtaaaatataaaattgaaaaggatattatatatagatatatatttataaatatataatgcacagttttcctacttcagattcccaggccccctcatctccttttcccccatcttattatttgtgtctcatggatcagtccagagttaatccatccatttatgagcatgtgtgtgccccaaaacttgtatgtgtgtattacacacattgtcctacaccttgcttttttcatttattgctctatctcggagatttttttccttattagtataaatagagttcatactctattaacagctgcatagtttttctgttagtataaatagggctactgctttgtaaatagttatatagtatttctttctgtagatgtgttataatttatatactctgcccccattgatggatctttaggttgtttctaatgtagttgcaatgcaaatcctgtacataagcctgaatacttcaagacttatcttagccacagcttttgagacccctcttcaaacttcatggtaagccctacccaagaacaggccttactattgcttcacaaaccagagtgaccttccctggccctagctgctcctctgaatgctgtgagacaacccttgttctcaacagactgttttcgccttctgagaaactgcagtgcctttacctgatatctgagaccagaaccaacatattctctaccttctgaccttgactggacctggctgttccttgaagccctctttggtagagactatgccttttatatgccccatgcattactgggtcagaagtgaggtttggttttctctggcttcctctgccacttccaagccattactagatccttgcctaacctgtttctacagccaccttccttgttgcaattagattacaactttcccataattccccatttattcattgaaaattttagtacctgcatcacagttttcctttttaatctcaactcttgccataataataatatcattatagtaaccacatttattgaatactactatgtgtaggcactatatctttacatgcattacctaatgaattcataataataattctgtgaattaggcttatgttattaggcccactttattgattaagcaactgagtgtttagaaagatagaaacttgttcaggatcacccagctagtaagatttaggaccaggattcaaatctagatctatttaacttcagagcttgtctttttaacactaatcttagaaccctactttccaaagcatgttccacaggactccagtttctagagtcattaataggtatcatattatacacggttctatgtcaaagaaatttgggaaacacagaattcaacagagcacaaagccaatagattgccttatatcttaggacttctcagaaacttcagtatacttaggcttattgtgattctttaagaagggaatataatatgcacagctttattgcagacttatttgaccatgaaacactcttttagagacacattctgtgggactagttttccaaggaatatacttgagaaaagtctgcgtcagagatcccattgtcatttcattaaaactgtatttgtgaaggtcatcagtgagctcctaactgataacttagtggttgcttttcagtgtttatcttattggacctctttgcagtatttgacacttctgcacagtccctcctgttttgacatctaagaaaccatctccaactctcctctttgatctgtcttcagtctcttttctgatttctctgtttgctcatttcttaaatgttgttctttccagagttctttcctcaatgctcttttcatataaatctatacatttttcttttgaaatatcatttattatgtcacctatcacctatatgtgggttgctctcttatccagcccagaccctaaacccatatttctaactacttcttggacactcacttgtcccatcagcatctcaaattcagcttgtcccaatcaaaagacatcacctctctaaaacctgttttacgtcctgcattttgttcccatgcttcccaaatcaaccctgaacccactagatgtgattgggctcctgagagataagagaaagcgaagacattctttttaagatgtagaagaatgaggagctggagtttcacttatcctcagagggagagaaggatgaggtaactatcttatgcacataaaaagtactccataaatatctgttggcaggatgaatgaacaggatgtagagtaaggaagcttgtccttttgcattctgggcagttgagttgtgaagaggaatgaggggggttttcttgcctaaaaatctctagaaaaggagaggtccatacccattctcgcctattctcacttttggttgagaaaaaaaattttttttatttccaaattttatcttttaccagctacccatggctcttccctctgcttacacagcttgcctccacttccttttactattctaagtgacatagagacaaggatacactgccgttgtactcttgcagccttctcattcagccctactttcataccatttcccctcagtggcttgacaacaaattcttgttcctttgtttttagtaacaaatatttttaaattcagatataattaatataacataaagccatcttaaagtatacaattaagtggtatttaatatagtcactagatcacacaaccatcaccactacctaattccagaacattttcatcacctcaaaaggaaatcccatacccattagggattactccctattcccttttccaccagcctgtagcaaccatgaatttactttctgtagatttgtctggacatttcataccaatggattcctatcatatgtggcctactgtgtctggattcttttatttagcttaatgttcttaaggttcatccatgttgtagcatggatcgttacttttggctattatgaataatgcagctgtgaacattcatgtacaagttcttgtgtgaacataagttttcagcttttttgggtatgcacttaggaatggaaccgctaggtcatatggtaacgttgtttaacattttgagaaaccgccagactgttttttaaagtggttgtgctattttaccttcccatcagcagtgtatgagggtttcattttccccccatctttgccaacacttattgtctgtctttttttattatagccatcctagtgggtgtgaagtgctaacttgtgattttgatttgcatttccttagtaactaatgatgttgagtatcttttcatgtgcttattggccatttttatatcttctttggagtttagtagtctcctcttaaacataggggatacattcccagaccccaaatgggtacctgaaaccatggatagtaccaaacttcacatatactatgttttttcctatacatacatatgataaggtttaatttgttaattttagagacaggatctcactctgtcctgcaggctggaatgcagtggttcactgcagccttgaatcctgggctcaagcagtccttcyacctcagcttcctgagtagcttggactataggcatgcaccaccacacctggctaagtttctattttttagttttttgtagagacaagagctgtgttgcccaggctggtcttcaacttctgggctcaagtgatccttatgccttggtctcccgaggcactgggattgcaggtgtgaaccactgtgcccagccaatgtttaatttataaattaggcacagtaagagattaacaacataataaaataaaacaattataaccatatactgtaattaaagatatgtaaatatgatctctcaaaatattttattgtattgtacagcaggtaactgaaaccacagaaagcaaaacagtggctaaggagggactaccgtaatatctattcaaatcctccgctcatttttaaattgggttatttgtctttttgttgttgagttgtaagagttcttcacatattttggatagaagtcccttatcaaacatatgatttgcaaatattttctcctactcctgttcctttttaattttttcaaacctcttttgaatttgccatgttttgccttaattatgccctaacttgcaacctttcttctctttctcttgcctatctctggggaaattggccacagcagccaagcctctgaagcaataaggaggagctgttttttctagggtgtggaagtagcttgcctagttggtcagtgtattattagggttctccagtgggagagaaccaataggatatatgtatatataaaagggactttattaaggagaattggcttacatgattacaaggtgaagtcccatgcatgataggctgtctgcaagctggagaaagagaggagccagtagaggctcagtccaagtccaaaagcctcaaaaccagggaagctgacagtacagccttcagtctgcagctgaagacctaagggaccccaggaagcctcttggtgcaagtcccaaataacctgttcaagggccggagaagaggaagcaaatgtccacatgggaagaaaaaagagagccagaaaactcagcaagcaaatttattccaccttcttccacctgctttgttctagctacactggcagccaattagattgtgcccacccacattgagggtgggtcttcctctcccagtccaccaactcaaatttctatcttctgtggcaacaccctcacaacacccagaaacaatacttccccagccatctatctaggcatccctccagtcaggttgacacctaatattaaccattaccgtcaatgaaagcatgttctggagcattgcagccatgaaagcatgttctggagctgccagctcatgtagcatcctgatggtctcagtccctccttttctgtttctctaatatacgcatctagctccgtccttggaattcaaccatttaggtaaaaactaaagttgtcagtagaaaggaattcaaaagatgaagctaagtagatgacaacagtgatttctttaggaataaagcttcaaattttcttttctttttcttttactttttcttcttttctttttcgagactgagtctcactctgttgcccaggctgtagtgcagtggctcgatctcagctcactgcaacctctgcctcccaggttcaagcaattctcctgcctcagcctcccgagtagctgggactacaggcatgtgccaacatgcccagctaattttttttgtatttttagtagagatggggtttgaccgtgttggccaggctggtctcgaattcctgacctcaggtgatcctcccaccttgacctaccaaagtgctgggattacaggcgtgagccaccatgcccagcctaaattttcttttaaacatgagcaaagtccctccacctctcccacctctattgacactgaaaagagcagagctgccagaaggattcatgtggttctcctgcttctgttctccatatctgctaagcagcagcccagagtagggatgaaagctgagactggtctagttctcattctccaaagccaccaactgagatgatccttccactgtattccaaagtttccctacaaaggaaaggaaaaaaccagagtgcctggcttctggttctgaattgtccccttccttccttccttccttccttccttccttccttccttccttccttccttccttccttccttcctccctcccttccttcccttccctttcttcctcccttccttccctttcttcccttccttctgttccttcctttccttcttttcttttcctttcttttccttccctttccctttcctttctttttgacrgagtctggctctgtcgcccaggctggagtgcagtagtgtgatctctgctcactgcaagctccgcctcctgggttcacgccattctcctgcctcagcctcccgagtagctgggactacaggcgcctgccaccatgccyggctaattttttttttgtatttttagtagagatggggtttcactgtgttagctaagatggtctcgatctcctgaccttgtgatccgcccacctcggcctcccaaagtgctgggattacatgcgtgagccacctcgcccagccccgaattgtcccctttcttcccttgccttttaaatatctgataccactgagttcctgatttcaccttttcctcctctcatgggctgagtttgtccccattcccaccccaaagttcataatgttgaagtcttaaccttccccaggggttggatacctaaccccaggtatcttagaatgtgacattatttggagatagggtcgttaagtgggtaattaatataaactgaagtcatatgggtgggctttactccattatgactaatgtccttggaagaagaagaaatgaggacacagacacagagaggaaagaccatttgaaggcagagaagatggccattgacaagccaaggaaagaggccttgggagaaatcaaccttcttggcatcttgatcttggatttctaatatccagcattgtgagattttttttttttttgagatagggtctcactctgttgcccaggctggagtgcagtggtgcgatcttggctcactacagcctccacctcctaggctcaagtggtcctcccatcccagcctccctagtagctgggaccacaggtacatgccactatgcccagctaattttttatattttttgtggagatggggtttctctatgttgcccaggctggtctcgaactcccaagctcaaacaatctgccccccttggcctcccaaagtgctgggattacaccacgcctggtcaaaaataaattttagttggttaagccacccagactgttctactttgttttggcagccctagaaaactaatatacctcccatggcagaagagggaagagggtggcacaagcctcagtatttctcgcctgtcaatatttgtttcctgaggtccacttggagagaaatagggtttccagactggtagacacagagcccaagagcccattcacaatattgtgtcttttgtatccgtttactgttaaattgttactaacaaaatttagggctggatagaaatgccgagaactgggtttttgtattagctcacccttaaaatctgaaataactaacaaattcatatttgttgttcttctcagttataaaattagggatagcgacttgttctctctcacaggattttggtgagatcacagaaaaatgcatttttgagtacaaagctctacaagcatttgcttaaaagtctctagccagcctcctagtactttccagaactgttggcttttagggatctgtcatgacctttctagcctagacctgaggcaactgaatgacccatcaaaggtcattgctgaccatggctggaacctttgctgctaagtgaggatccattgacactgctgtttttttggctgatgtggcaatgagccaatgccataggatttcaggctgttatagggatctaggccaccaggtctcccctgtggtaacagggttgctagggtaacttatctatggatgactccaatgaggctatttggtatgttagtgcttctctgggaccaccaaagaagaggaagaagtcaacggaagccaaaggctgacctgtgcaatgtgggaacattttcaaagagcagctttcatgcacttgtcagtagcaatacggatgttttttgtttgttttacctctgaaatattctggacacatttatggcctggatctggatgttcatcaatggtggatcttctataaaccttctagttctgggctgtgactgagcctggtgaattataggatgtcacacctggactgagatttggggcagtggatcatttggaagggtggatttggctctggtttccaaggagcacatagaacatttccaagggatgccataatgtcatcaacctgtccagagttagagaaaagggtatcagatactggctgcgggccttagctccaaatggtaggtattttctgggcatagtatcaataaagggaggtacatagttaactcttatggaataagtcagattcctctacaaaattacttgcttccaagtaataagcaaagcatcctttctcactctttaccaccaccttctctgattcctgctgcttatttgaccatccaaccaatgagaatattcattgctggctgttcctctgtgaaaaaacatccttttgccaaagttatccaaaatgaagcaacttaagtaattattcagggttttttgttttgttttgttttttcgttttcttttgttttttgagacaaggtctcgctctgtcacccaggctgcagtgtagtggcgtgatctcggctgactgcaacctctgcctccagattcaagcgattcttgtgccttagcctcccatgtagctgggattacaggagtgcatcaccacacccggctaaatttgtatttttaatagagatggggtttcgccatcttggccaggctggtcttgaactcctggcctcaagcgatctgcctgccttggcctcctaaagtgctggtattacaggcatgtgccactgtgcccagcactttttcagttttaaatcaagcccctaataagtgggtactgctgggtactgttgggactatttgtaagacattttcctattctccaagagcttataggccagaggggaggtagaaataattaacagttaagtatttaaatacttttttctctcagtcactttttcctcattcttactttctgtgcagcattccatagtgtttttaaaactcccttttttcgtttcctattttcttctattattcttagattctcccaattctcttccttccttagctcctgcctcatttctttctacagtcttccctcaagcatcacttttaatctcaaaactgcatctcttcagcctctaatcaagaatctttaattaagcaactactctatggaaggtaatgtgcttggtcctacctactgtgataggtaaccagtaggcttccaactagccttttttttttttgaacggagtcttgctcttgcccaggctggagtgcaatggtgcgatctcagctcactgcaacctccacctaccaggatcaagcaattctcctgccttagcctcccaagtagctgggactacaggcatgagccaccacgtctggctaatttgttttgtatttttagtacagatggggattcaccaataatccacccgcctcggcctcccaaagtgccagggttacaggcttgagccactgcacccagcctcccaactagcctttgtaagcagatgttcccaaatctaaaccttccctttttccttaggctctattcttcctgtctagttatctactagttattttcactataatttcccaatgtttaaaacttccctcttgagcctattccttttcctttgttctctatttatattaaagttaccatcattctactagtcacccactcaaaatcacggtgtcactttttattcttccttctctcttgcctcccacttagatcatttgccagctcttgctcttcttttctttgtggtttcttttaccagtctctgtctcttctctgtttccctttgtgttcgggttctctttatttgcttagactatagtattagtcttctaatggtttccttgcttttattttcttagaagccattttatgtattactgccagatttatctttctgaaatagagctcgagtcatggctaccatttataccaagggctcaacttggatgtcacattctttgaagcctttcccaaagtgcccaggccaagttagagtctcatcttttatctttctatagcatttcatatataatcaactttgatgttaatcacattgtcctggaattatgtgagcatttgccctcaagattatatatttcttaaaataatatattttgtatgattctttttgtattaagttcaaaaacaggaaaaagtaacctgtggtgtcagacatcaggatagtgattacctttgggggatggaatttgtagtgattagatatgagcacaggaggcttctggagttctggttatattgttttcttgatctagattctgtttacatggatgtaaaagtacacttttgacttgtttatgttataattataatgtatattatmattcaataaaaagtttaaataaaagctaaatgaaaaatagcattaaaatacagagtagagaaaatgtctgactttatatccctgatgcctggcacccactaaactctttgcagatgagtgagtgagtgagtgaatagagaagtgaatgaaagtttatcctcaaaaaaattaatttttctttacattggtaattaaattatagtctcaacagagcctgagttctccaccacttacggcctgtgtaaccttaggcttaggcaagttacccagccctttggaaacataattttttcatctctgaatatcatagttgcctcagtggatgaataagggtttaataatatcatacatgtagagcagggcatggtgtgttgttagcattcagtaaatgttaatatccttttctttccaacgccttcctccttctccctttcatctctttacccatcctctatcctctgccttaaatatcctttccttttagtttccacatatccaaatattatccattctttggatcaatctcagatatcatgctcttcacagagccttctctgactcacatccaaaccagtgtttctaatgctggaaatatttccctctctcaaattcttgtacattttatctgtgtcccttatgatacatattagtcactcactccaacctttaggagttgctgaaggctgccgtctgacttcaggcccaaagaagaataagcactgtaattgggctaatatgctggaggcaggagctctgtcatttggaacaaacttgggaatgaaaagtcaggttgagaaaactgctttgggcttttcatattcatttttttgtttgtttttttttttgttttttgagacggagtcttgctcttgtcacccaggctggagtgcagtggtgtgatcttggcttactgcaacctcctcctccctggttcaagtgattctcctgcctcagcctcccaagtagctgggattacaggtgcccaccaccataactggctaacttttatatttttagtagagacagggttttaccatgttggccaggctggtcttgaactcctgacctcaggtgatctgcccgctctggcctcccaaagtgctgggattgcaggcgtgagccactgcacctagccctgatattcatttttgtacctccccttacacttggagaaattcagatgtctattaaaaaatatgggcccaggggctaaagtttaagttgcagactgtttgacctgccttttgaaatggttaaaaacctcttctgctaaagacgtcttttggcccagcttggcttatcaaggtaaaaggccatgcagatgtttgagtctcaagtcttaggaattaagagtagacattcacctggagtatcttctctgcctaatatccctagtgcatgtaggtagaaaaacagttcagggaagaccccattcctggccacttattttcttattattttggctttctacgtgtattttccttgcatacttacaggctttaaatcctttgctagattgctcttgaggtcaagaactgatcaccaattcttagcatcaattcctcctgatacttagtaaaaactcagcaaagatttatggaatgaacacttaaaaatattaggtggccgggcgcggtggctcacgcctgtaatcccagcactttgggaggctgaggcgagtggatcacctgaggtcaggagttccagaccagcctggccaacatggcgaaacccccatctctactaaaagtacaaaaattatccgggcttggtggcgggcacctgtaatcccagctactcaggaggctgagagaggagaatcacttgaacccgggaggtggaggttgcagtgagccgagatcgcgccactgcattccagctgggtgacaagagtgagactccgtctcaaaacaaataaaaaattaaaaaaattaagtggtattacacggccctaagtaactgattgcaaaagaaataattaagtcttttaactgaaaatagttgccacaggactttaaggaacaagccctttggattagggtgatcagagaagtcttctcagaggaattcccagagaatactaagttagcagttaagtatcaggaaatggccaagaaataaaataacatgagcttctaaagatggaaatcaagggataacttgcttcctgtgtttgcaagcatatgccatgggggagatccatggcctcttgcaagtggcatgttgcattcttcctgtggacaatgcagctgctatttaccactatgccctgaagtacagtcatattgtaagacttcagtaaacttcctgaagccaaagggaaagaggtaagttgtagcccattctttaagctgcttcttctctttgctggttgtcaccttcaagcatgctaaggaaatgtgtttattcagtcctcacctgagaacactcagacttaaacagccaaagaagacaagttaggaagatcattttagatgaaaaccaacctcctggagcatttgttaacgacagatgagataaaactgttgactgatttctctctaaaatattcttccttcttggcctttttttttttttttaaaggggtcttggtctgtcactcaagctggagtgcagtggcacaatcacggctcactgtaacctcgaactcctgggctcaggcagacctcctgcttcagcctccaagtagctgggattagaatagctaggactacaaggatgtgccaccagacctggctaatttttaaatttttcttgtagagatgggggtccccctatgttgcccaggctggtcttgaactcctggcctcagtccttctacttcagcctccataagtggtgggattacaggcctgagtcactgcgcctggccccatctttgatttcttcatagcatttctctttctctgcttgccccttaaaacttgataattcccaggctttgttttctacctcattttcttttctagttaatctcatccatgtcctaacctgtaactgataaatcccaaattactatctctacctcagtcctctttcatgagttccagacttttttatccagcttcctgtggatattgtcacctgaatgttcatagccacttcatacaatgtgttcaaaccgtacttaccatcttttttttctcctccacttcctcttctatatatcctttcttactaccccgtcaaacataaaatctaacactcctctccctcagaatatataacatgggtataacaatgcctcttgctttaacatttcccccgttaggttatgaacttcttaagggcaaggattgtatcttttcattacgcctgttaacaagatgttgttacttaataggtgttcatttattttttgttttttatttattttattttttcgagaaagagtctcgctctgtcacccaggttgaagtgcagtggtgtgatcatggctcactgctgccttgacgccctgggcttaggatatcttaggttatcttcccacctcagcttcccaagtagctggtggaaggggcaaaagaactcctgtgggcctcttttataaaggcactaatcccattcattagggctctgccttcatgatctgttcacctccccaaaggctcacctcctaatgtcatcaccttgagggttaggattttaacatatgaattttggagtgacacagacgttcaggcaattcaacccattacaggtaccaaagtagtttttcatgtttatttacaagtcttatcttctgacaaagcacttgaaaaggttcctaccttctcaccatcctgatgtttactctctgatggcactctacatagggccatctggaaacagaaaggatgagatggcacattaagtgagtgcaaggggtttgctttgactaaagttagggtgttgggaagccaaattcctctagacatgggcaggtcaagaaagaactttgataacatgtaaagaactaggacttttttttttttcacagtcactgacggattttaagaaaatgagtgacaaaaacttatgtacatcttagaaatatccccctagcaaattgtgcatcacggatcaagggtaaagaggagtgagtgggaggtggttctggaggaatggagtctagggagaatgaatattttgcagtagttgaagtgagaaataagcctggactaaagattgcagaggagacactgatagataagaaggtaaaatagattatggcagaggcacaaagggctttgcaggggcttctctcactgggtaaagaattagaatatatggattccaatgatccagtatctgagcagagaagtcatctctgcatgggttgatatgggtgagctggcagcctagtcctctaaacacgtagttctctcttcagacttacctagttgagtgcttccctttctttccaccatgcttccctcttactgtcagagatccccagtgaaggatacgccttcattaagtcttcttttcccctttgtacattagctaccttcctgtaattcagtacctcatatcagatacttttgaatatttggagaatcctgtagggaaaaacccacctctttgggatcccttcattgaatgtgaagacacttgaaactcatctgctggttagggacatatttccacaagactatagaaacaggggcctaagccaggagaattctccagatttgggtttgccctatatcttattcttagatgtatcttagaacaagccataaagaactgaggggatatttgatcaatattaacccagttagtctccacttagtacaagaggttcatttctccctgggatgtcaaattttggattccttttagaggatcctcggtatatggcctctttgtttcctttgggtatagagattgaggcagggccaatgcactctgtggcttgggctgggatatatatataaacaaatactactttaggaccggcattagtcctaaatctgggagctgtgacttttgatcgggtttatgtgagagggcagtagacatataggtttcttatgatcatgaattgttaattatttggtcctgaaatagatagggggccacagcctttggaggtacaggctgaaaacctaactggttagctggccagttccaagaagtttatcagctccttatgttcaagtttctgctaatcagggatggtccttgacctgattgtaggactaagacttgtcagcaatttatgactcttagggcctgccttgcagcttgtcgggtctgtttaggtaacaaagcagctatgtcttagtgcatcagtaaagtcagcacatctctgccaggcttgtcactcccctaggatggcatgctcctcagggaaggagcaggattacctcctgctgcccgtcattctctgctgcatatgctttctccatggtgtagggagggcatcattctacagcgggaaaaatgacttttcttagccaccagaaaaatcatcttcctcatgaaataaatcccagctgtgtgactatatgtcagctttttcatgttgcttctggctttcctcagcagtagagaaggaaaacagtcacaagctgactcttgcatgatatagatattggccgcacccatcctttgtactctgcgtctgtgttgatattggacaataaggtaagcacctgctggtcctgacccagcctgtctctggcattgacacctgaaaaggcaggccaggtttggagcaggcatattctttgcttctagaccagttgtatctgacgtcagggagacttagactggtttgtatgagtagggagaattgtgattggtgaggccctcctccagtatttctgtgacaccactcagttgctttagctgaagatgaattttgtatgccaggtggttttctgactaacccacccattcggctcccctttagaactcctgcaggtctgaaccttcccacaactctgcgtgagtgtcagtgtatcatgttgagtttccatcttgactcatctgtctctaggcgaagatccctgcaaggatttaaattgggaaccagaccttgagaatgtctgttcagagcatttcacagcttctggataaatgccttttccttcttaacccaatctgtttttccagttctgcccagctagctcctgagcagcctactttgaggaagcttcccaactgaggtgggtgctgtgctatttcttacctctaaaaagcaccccatcctttcggcctactcaggcttccccagggccagatccactgtgatgagggggctgcattgttgcccatgtggctcacaaaacaaattgcctgcttgtcccaaagagctagtccactgaggagtcctgatgtcctttggccatgtggtgtctggcactctgtgggccctgtagaacagtggcagaaggggccatgctcttttacaagagcttccactgactgtttgccacttccccacttactctgtttcttgcttttgctggaacatgggaaggtggatagatacaaaggtaatttgtggtcaaagctgcatgagctctcctgtgaagtttgaagattgtaactggagatggcagatttgttgtgcctcatgtgctaaccacgtcttctactgcctgagcctttgtttttctggaaagcccaagctgcttagaaaaatgggctggatgtgtttgggtgacaagacagggtgggttccattagcctcagaaatgccatctggaggccttagccaggccttagggccactttgtcaattaggcaggaagaagtaggttcttttagcagggtcctacctctggggaatctttcccactcttgaaagtttgagcttctccttagcctaggaagcctgaccaaacctgatagtgacagccactgttctgggctctttatgagtggctgcagatttgggggagggaattctaatttaatcaatcttccctatatttcttgttttaaaccttttacctccttctcctggctgaaggatgggaaactccacagtaaattggctgtgacttccacagaaacttgacagttttcaagttatttttttcctctgtgtttagatgcggttatagttgtgctgtcaggccttatctcttctgtcatctagccagctcccaactaggttaggaggtatgtgctctgctgttagtgttggctgtgtaatgaggtggatggctaagaaatgggttgtttagcatctcttggaatctaaattttcttccttggttgagggggaagcaatgttattggaagaaggcagtagggaggcacatgttggctctgaaatcaaccctttcttctcaggatcttggataagccaaacaaatcattcttaatttaaatgcttgttttatctaccataaagggctgcctgttctgcaatggcagatcctaggatggtccccatagactgactacctggtttgtgggctaaagaggccatactctgttgtggattgccatgaggaatgttgcagggcagcagaagtcacaaggtttgagagcctggtttgggcatgctgggtaaatcaaacttgcccacgtactgttggcctaaggaggaagagggccttttctcttaagatcaagctcaggggagtcagaagaggaatgacttcactggattgttactggctgatcgagctctatattgagaaggattctgaggttatctaggttcattatgcgatgtttttcatgtcctatggttgcagagtggaaaggggatatcacatttcatgtatttggcattttatgctacagagcttcaaggggtcctggcttgtgctcggacattatgttgcagtgaacaacttgagtgttctttgaagataaggacattcaatttcccagtgagtcctaactagaattgttgaattattaggaattagggtcacatgagagccacctggctagtgagtctccagggagatagggcatccattggcaaagaagggttatgaaatttggggtcataaaaggggccctgaaccttaggcagctttttggtcatggtgatatcactttaggttacttcgttcctaattctggattctgaaaccatctttggtctagacttctgcaatacagagttcatctcagctcacctaacttcccctccttctctcgggttgttgctttggcatagcctgagggagctcttattttccagttgattctcttgtggtggttgttcagtaagaactggaatagatgtctactccaagaacatggcactgtttgattttaactgcacttgatcactgtacctatccttcagctttgccaaatgctgacaacagattatatatacacgaaaccaaccaaccaaccaacttagagcttgtctcagtagaagggaagactccctttgtattgtgctccagcagttccacggctggcatgctgtgttccggcttccctctgagactaggagctcctgaaagtataggtctccatctgtgtctgtttatatcctatagcccagatgtgagagaggtggataggggaaaagaaagcagggaggagaagaacgagggaaggaaatggaggaggggagagagtaagatctatatttagcaaaagggagagacacttaccaagggtgtgtgagtgagcttgctggcaagggttgtgtgtgcgtgagtgtgctgggaagggggtgtgtgcgccaggaacgtgtgaggagggctggtgccctatgggaggttgcaggcaggaagcagctggagaggaggaggagcagcagcaggagcaggagctgccctgctttctgcctcagtctcaaagcccagaatcgattgagttagaattccacatccagttgaagtttggctgctgttgccttcagcaggctgatctcagaatcccccttgccagagaggtgtggaccaggttagatttctacgtttgcagccagtgagactcctgccaagcccttcactgaggggtttttttgcagggcattgtttctgtcatcaactttgtgccgtggagccagccagctgggtgcaactgagaatattagctccttgggtctgtttgtcggttgggcaagcagtggtgctttggctcagaaagttcgtcctgtggcttctctgtcaaaccaaggagtgctcctggatggatttcctcttaaagacagcatttgccttctaaaacttgagaattcatggttttaatttttttttttaatttccttaacccttattttggttgcagcagcaaggtaagtggtaccgagtgtgtatgactgactgaacaacaagcagggcaaaaggaaagcatttgtgggtggaatatggagcagctacattaattacgtaattgcttgagtcaacttgctggtgaggggggtcattataatgagtgaaaagtagcatatgccgcactggggtagaatcttcacatgcatgtatttgtgtgctgataatctgaccatccattcctctgtggtactttcctgtatgtatatagataacccagccaccctctggatgtgtgcatattcatatacaaataatctgtttctcctttttcatgtgtccatatgtgtttatgaataaatgacctgtccattcctctcctgcatgtgcatatgtatagacaactcattcatccagcttgcatatatgaatatgcaaaattcgtctctccctacttgcacatacatatataatccatcccttcatctcctatgtgtatgcatgtactcaagtaacctttctgttcttgaatatattctgtatcatttccacccttcctgtatgtgtatatgtgagagagagagaaagagagagagagacagagagaaagagaaaaaaccaccatcctaatgtattaattcatccctttcatgtgtgtatatgccatataaacagaaaagtcatcttgagttttctcagtcttgaatatatgcacacatgcgcaatagacagtctgtccacttgtgtcttgcatgtatgaagaaagagcactaactttgcagattgaagactcacttttaaatcctagctatactcagtgaccttggtcaagtcatttagcctctctgagcttcatttttctcatctatgaaatcagtataatcagaacagtaacaacaaacctcctgcctcacagggttgttgtgatgataaaataggaatcatataaactgaaaattctaaacaaatataatctcttactactgtgtgtccctctagtatgagttggataggatagcgtactcttggtccagttttattgaaattatgttcttgtctgtgagaggtttctaagttttccatgtgaaggggaagcatctattgaggtaaccaggtttatcctgtggttttctgcagagtattggaaagaagcggggtaccgtgaaagggtcaggtggagagggagaaaagctctcatcttctgtaggytggggccttgatactttgttttttgtaccttgaggmggattgaacctcacacaaaatggaaatgggctgcttccagccaggatcaaagtgagcaggtgaaaagatgagtgaaagaacgtaacattcgactgcctctgggatgacagtgtgccctttgcagtgagcttctactgccaggtttggaaggctctccagagtatttcccaccccagaattctagacccatgctgtccaatgtggtagctactggccacatgtgactgctgagtacttaaaatgtggctagtctaatttgagatgcattctaaacataagatacatactagatttcaagaacttagtataggaaacaaatgcaagtatatgattaataattttttatattgattatatgttgaaataatactttggctattgggttagwtaaaatatattaaaattaattctacctgtttcttttttatgtggcgattagaaattttaaaatgacacatgtggttcacattatatttctgttagtcagtgctgctctaaactcacccatcactagcacaaggatcagggcagcttttccaactcggggtaggggatgggagccctgtcacagcatccctggggtaacaggaaccacagcaggatctctccctgccagtctcatacactggagagataccagctaattgatggtctggcagagaccggtgctgccatgcccccacactctttttttgtttttcttttttctttttttgtcctgagtgagttcccagataattttaagtacaactggggaaagatttccaccttagttttacaatgaaagaggactgtaagccatcaatctagaaggaaacctagaacttgaatgcagcatgttgtcatggaaacagaaatggatgagaaaattaggagacctggattctaattcggctctgccatcaattcatttatgctttccatgacaatgaattctcactgtgtgtcaggcatagtaatgccctgttctaggcactggaaattcagaaacaaataagacacagcttccaatgtaatggagttcacacccgctgcggatctttgaataggagcctcccatctagtagtctgccacagcaaaacagattaatgacaacaagggtctcattctaggtcaagggtagtagggcttttgagaagctagagcacctgccctgcctaaagactttcaaattcaaagtatagaaaagcactatgatggtaagactactccataacctagatcacaatgtagtgtgagattccaggcctagacaccctctaaagggtttgtccaactatgttctggtttcttttattcaatgacagggttggtttgttttgggtttttgtttgtttgtttgtttgtttttagcacaggcactgttttaggtgctgaagatacagttatgaacaaaacaaagtccctgctcatgttttgggatacagaggtcagggagggagacagataatgaacaagctatcagatgggaatgagttctatgaaggaaattctagaggaagaggatagagatgggtttttttgtggtggggtgttcagtgagtagattctcctgcactcgtatctttttcagtgtactcacaagagcaggaggtagtaaggaaaaagagggtatgtgagtgttaaacaaaaaattattttgacacttgttaaagatgataagacagactttatgtggggggacgacaatactggggttttgtagtgagggtgaacaattgagctcaactccaaatataaggaaaagtgggaatttagccaaggagcagggtggggtatcagtggacggaaattactaagatgaagtatcaaaggggattttggctaaacttacttgacaggatttttgctgaaggcaggccaaggtggtaagatatcaggggtaggggataagaaatttggtcagataccaagcatagacagatactaagggtgaaagatgaggaatttgatcagaaatcaagggtgggaattttcaytaaaatgacctggctggattcttgttaaaactggactaaatgagccaatgtcaagggcctactcagaaagaggactcagaggagcctgacttatgtttcgtcaaagaagagtctttgtcatgggttagattctgggtgtgattgtatttgttgtatgctttgttatactccttggtataaaaaaccttgctactgctgaaagggagccctgggcagggcacagaatagcctgctctcatgcctggcattcagtctccattatgaggtattgatatgccctccctctgaaggctaggtccgccctcatgccactgtcttttaactgtatgttacctgagattgtctcccttcttggatatagaggcttgaagttttctttcccttgtatatgtctagcttctggcctataaatggggctgctcttaatgctgatgaggatggatggcaagtcctaggaactgcaatactgggaccttgctaagcctttgatctagggcatttctcattccctttggctaatctcacttgccatatcttgtgccctgatcattttgatgattaacatcctgagaatccccatacctgctgtggccctagaaatccattcctcttagcccatattagccatacaacataattgatatatggcccagaaatgctctgtcctctgttgggggctcagagctcttggatttctgcttgctgggattgtttcacacaaactgggaagctgcttgatatatgtacatcgagtcctggccttttcccagaggtcccctggttgtttcctctaagccagatttgggttagaagcagtttttacaaggaatagttacattccyaatcacatttatttgataagtcagagagaaggataaaagaatcagccatttcaaaaaactgaggtgttttcctttctctttttcgttggtaggctggtggtgatgcaatgtggtttaagggatctactccctgcagtaattgttagctttccatcattaaagctttaatctttttgattaattcattttgttttgatgtgctcccttttcaaatgcagatagtccttgaaaggggctgccttatttttcccagccttaggcagtcctgaggaaaagagcacagaaaggtatggtttttgtcggaatgtgtgtgtatgaaatttggagagttgtccagagtcaataggccaacaaagtagggcagacagataacattgggtatcttaaaggaaactccaaggctaggtggactccagagcctacttaccccatcccagctcaaacattacttttctgtggccttgtatgcctcgttttgctgggcctctcacctcctttccattcccaacccctgaattaaatgcttactttctttttcattttttttttttttaaagacagggtcttgttctgtcacccaagctggagtacagcctcaacctcctgtgctcaagcgatcctcccacttcagcctcccaagcagctgggaccacaggcacatgccaccacatccagctaattttttattttttgtagagacgtgatctccctaccttgcccatactggtctctaactcctgggctcaaaggatcttcctgctttggcctcccaaagtgttgtgattacaggcgtgagcccagctaaatgcttactttttattataacttttattataatatgtatcactttatattgtgatcatctatatatatctttctctccaaatcttaatgtattagagagcaggtactgcatcttatctccctggcacacacagtaagtactcatgcagttcaactgacttggagatcaaatggtccttcttacagtttgctccctgtcatttcacttctgtggacagtagtagcaaagagaggctgggaaggaggtgaattgggcctcctgtccctgagggttgccctttcagcccattctggcttctgatattctactgagctcagcacagtgactggttggtcctctgagcatcacatcgagctccatcccctgcttcaaagcccaaagactggattactaagtgagtttggtgcccttcctatatcaccagaagagattcttgagttcaaagttcatcccagggcagtggctaccaactcataagaaggtgtggaggcttttgtttgtttaatatggaaggaagcatctttgtttgaggctgggagaagctgctatggcagctctagttgaaaatttcctatttgtcagtaacatggggaaccaggcagctctgccttcagtcttcaggaggccacaggaaaggactctgaacccagtggctatgccatttgccccctgtgtggctggccagccagtgtcgtaagcactgtagtttggaagggaataccttgtaaggtgtccgggaaatgaggccaagtatgtctggagggctgggcacggtggctcacacctgtaatcctagcactttgggaggcgagatgggcggatcacctgaggtcgggagtttgagaccagcctgaccaacatggagaaaccccatctctactaaaacaaaaacaaaaacaaaacaaaacaaaacaaaaacttatgtctgcagtattgatctgaggggcagaagcagataggccccaggttagcctggtctacactgaatcagtagcagtagcaggggagtcagcttcattagtgttcccgacaaactgccttatctggaccaaagtgaggctggccttagaagacctggcaatgaattctgggcctcaccagcattggaaaaataaagcttggcttctatagccatttatctcttcctcagcgttcaggctgtctgagagacggccggcctcctgacacttgaatgaggtgttgggaactgaatgatttactcctccttctccttaccttaaaaagaaaacttctaggagaaagcaggactaactttaagggtgacagtctcctcgtaggattccaggcactgctgcagaccattagaagggagtgggaaaggcaggagtctggggcagaagtagaagtcatggctcactcaaattgtgccagttaggtggttggatgcttgctttagatatgggtttccctactttgttgactcagggacttgccacatcagtagcaataacaacaggacagtgctttacagtttagtaagtacagwtctctcattttagctttatataataacattcctgtaattatctcccccactttacagatgaggaaactaattcacatagaggtcaagtgtttaatccaaggtcactggtggaacaagacccaaacttaagtctcttgatgccagtccagtagcacttgctcatggcttcatgtagttgtacacagagcttccatcttagtttactaagcttactaagcaattctaatttttttttttgagacagtcttgctctattgcccaggctggagtgcagtggtgcgatcttggctcaccgcaacctctgcctcctgggttcaagtgattctcttgcctcagcctcccgagtagctgggattacaggcacctgccatcactcccagctaatttttatatttttaatagagagggggtttcaccatattggccaggctggtctcaaactcctgaccttgtgatctgcctgcctcggcctcccaaagtgctgggattacaggcgagagccaccacgcccagccgcagtacttcttttttaaagacaaatttgaaaggccacttgccagctgcagcccttgtaaagccaggaacattgttcatggctaataccaagagcaaatcagggatacccaatccctacatggttggggaggaaaaaaaaaaaaaaaaaaaggagtatctttggaaattcagattttgtccttgtgggaagagagaaggaagaatttggcatcctctagactttggagcgtggtctacctaggcagctgggcaccaagcccragacccagaaattctggttgtgcaggtagtgcatcctcgcaggctagactgagttggccagattaggggcatggctgttcctggccccatgagaccttgaggtgaagcagtaatgcctcacaggatggatagggttcttagatgaagaattcctcaatgaattagagttgttagataagctggaaagaaaaggagagatgtgaaatgggaatacatgcagtttctgtctcttggttcttggcctagttatttctagtaaaaagaatcagcttcatctttatcccaagtcytmtgactcgtccttctggttcctcctagtctggggaagcacaatgcttttaaattccaggcccacagactagatgtaggtggtggcctttcctgaaaatgggttgccatgagagcagtctgcctgtgttctttaaggcattttcccacttttaggattaacttgagtactgggaaaataaaaggaggcagagtttagaagatttagaaatctccatcaaatctagaaaatggggaaagcatccctggtcaaagaacatgaagagtagcatgtctcccaccaatccatcttacccctcccaggagacctagcaggactggaatattagttgtcccatgtgcctcctagatctctgctttcctccttgtactttccactctactgcttccgtacactctccacattctcagtaaaaagggaatgtattctcactccacatgaggtaatcatcgtctctgcctctgtaatgcagtcaccaatagcttagggtgtagggactagactggtggcaagtctgtctttaccttattggagaagagtaaagcaccctggagccctctgtgaggtaaccctcccccacatgtcccatgtgatattctctctgggccaggcagaggattagagcaaccctttgttattaatacttgagcagtggacagtgtgctggacaatcacttattgtggtgctctgaaagatcctctgtgggccaggaaagccaaacccagatattgactagctgcagcaagcccttagagagtattaagtggagctcaggagcaccaagctaagcctaaacctccttcatccccagttgtgagttcatgatacctgtctctttggctacctgcctctctacctgcctctctcatgctaaatgccacctacgtctggacagtgtgtgcgtactgtgccactttattctagaattaggtaaagaaatatttttcctgctaagtttaaaatacktaaaccattgtcctttctccaagtgaacggttgccatcactcaacaaagggaaaatactttgtgctataagcacaggcaggggtaaacttttgagtaagtggagtcttcaccagaacaacaaactggaaaagaaagaaagaaagaaacattccatgtcttgtctttcactgtgtatgtgatttgagccttggtggttaagcatttgtttgtttatttctgagccagactyctagtactgaattttgtgaaagttcaaataaggacttactcattgaccttacttcatctacctcccagcagcttgtctcaatatcgttgactttgggtacttgcccagaacacaaggactttattttaattttacattgatactctaaggggaagctaatgagaaacaactgactgcccatagcctttaagactggggttgggaggcaggtcagggttgattcctataatcttaggagataatgtttttattcctgcttgacaacttgattcaaactaaaatcatcctgctactttctgacctgagtgcactattttcctttttcactagctacaggataaatcaagccaggatccaggggcatgtgcgaggtttggaggccacacatggggccattccaggcagcactgtgggctaagcccaaagcatcagccagcaataattgctagaaacaaactgaaaagagcaggacaggctgttgccttccaaggtaatctctattaagcatcctgaccagaartaagaggaagaagcagagaacccctcaaaccctgagggagaaaatgaagcgattgttgcaagagtcagaggaagaaatcatggttaccttgggaccctcctccaggctttccccagataaggctaaggcagagaccatgtgtggcaccaagagcaaatcctctggccctgctggatccttaccagaggacaactccctgcccccttgctgtgggtcagcagccttagccattggtggagatagagatggggacctggcccagctttgcagctttgggcagcagaacaacagccagcttcctctgggctccactgcctatgtttcagggtctggttctcaggatccctcatctgtcagcattaccacaagctgtcaggagccctcagagaggaaccaaaccaagacccttttgtccagaggccatggccaaggctgtagccgtgaacagcgggaacctttgggggatgtagtagaatacatcatcagagagctgcaaggcatcagccgtcttcagactgagattgctgagctgcagcagcacttgagccaagtccagggttccgtggatgaagtctctagctgtgtagactcagtactgagtgaaatagaaggcttacaggtgagcacctgttccctggccaaggtgtgtgwgggtgaaaaggcccaggaaccccacgtggacagacccagtgaggaagccattctgtatttgtayggacttcctgaacaagatggagaaaatactatggaactggtggaaagctttctagccaagcacctttgtgttaatggcatgcagtgcaacaggtacattaaaaaggcttacagggcaggcacatccccttcccctaggcccactgttgtgaagcttgcccatctagagcatagagacttcatcttgcagaaatccatcctcttgcagaatgtgggagtccgaattgccaccagagaagaaccaagctgcccacagggtaataagaatccccagaaggagtctatatcattttttcaacaacaacatcaggattatagtcagacttctttaaaccaggatgaaccagttcttcagatggaaacaggggacaggggacccataacaggaacatatcagatgaaggctcaggatcaacagagagagcaccaggcccctgagcagcaaggcccttgctttctactcaagaacaatttatcaaaggaaagtgatgtgcccaagctaggggatgaaataaaaggagcatcaagaacatctcaagttatcagtggcagctgtgatgaactgtcagagaaaaaggcttctctgtctaccccccatcagtttgaggaacctgccctagtattaatctcaaaagaggaggcttctgggaagtcccagtttttcaaacagtacagccaaaaacatgaagcatgtaaagtaggaaaaccagaaaatgactgccacgataaaagtgaggccagcagctgcctgtcattgtctgggttactgaagacagagagaataaacgcagaggacaagctcctgggctgcgaagctgggctcgatattctgagctcaaaggaactagaggaccttttggcagacaagtccagaaggcttgcagctctgagctgtgacagcatgatggaggaaattatcatagggcctgagactttcagtgacatggttcatattgacctgaatgaagaggaggaatgtgctgctcacgtcctcaaggatgtctttgacaagtcctcttgtgttctgggtggctctcaggaggatgaggatgtggaaatcaagttttatacaagtaaactgggccgagcaattcaccactttcgttctgctctgcagggtgtgtttcagaagctggagaacagtgggtccatcagtcctgaggacctggaaagcaatgagagtggttcccagtcagagaacagtgatcgacttcttgggacagtgagttcagggggtgcccaggattgctcactggagagccctgggagtcaggggagtgaaagcttgctcagtgtggtctctggtggagttggcgtctccacacagggagagcaaacccctcaggatccaagcaccttctctcttgcttctaataactccttgccaagtgttgctctggctccatgtctgggaagtgagacttgttccaggcctggatctcccaagcagggcagactgagcctagagcaagtgtgtacagagaccgtttacctcaacaagtgcatcaacaattttaagaatgttctaagagagaaaagactaaggcagaaaaaacttctgcatgagctagtacagaaggcaaaccgtctctcagtagaagacatacactcaggtattctgagtcactatttaacagggtcccwgctggctaaagtatgacctccatctggccagcatgagacctggtgtggtggccagtttaataaggtgttggttgacgtccatagcttgaatcaggctaaattactcaagtagagagcttaagctaatcctgtgggaattggagtgaaagatggttctcaagcaagaggaagcttgaattggagttaaagagggttctcaagcaagaggaagccgtccttatcttccagtctcttgttgtggtgctatacctgttcaaaagagggaggagcatctggagcagaagtagtttgcagctgcagagcttttaggatatcagatgtaaagaaggggtgggagtgagaggcaggagttggggatgacacatatttgctcacaggcactagaagggctgagaaagaatcctgtgttgcatttaaaaattcttctctgtggatttgttgctgagataagattgccatttccccagtagctgatggggcttctctcataggcccctgtgggaatttcccctaccccaggtacctgtctcttcctagtacctgacttgctgacacagaaccttatttctgatttggggcatccaggagctgcttatagtgctgacctagccctagagcccaacgttgccctccacaggtcttattccctttcttccatctccccctaaaagctgctcacctgcaagctggcaaatggaatgttttttgactacaggaagtaagagaacatttttctaggcagtttggagatatgtagctttaaaattactcttcccaatcaaaattaaatttatccaaagagcatatgctatattcatccagttttaaatttaaatggggttgtcctcttatgcatataacctgattaatcttcctaaggcaacatctaaattgtgaagcatattgtgttggcaaaggtgtgagggaatatgcacttgtacgttgctggtgggatgggagtatamattggcataatctctaaggaaggtaattggcaaaatttatcaaaattacaaatatatatataccctttaagtcctcaacaccacttacaggaatgtatcctgcagacacattttcacatgtggaagtgacatatggacaaggctatttttgaagcatagcttttaatagcaaagattaaaaataacctaaaaattcatcaggaattactggttaaataaattattggcacgtccaaacaatgggatatagtactgtgtagctataaaaagaatgtggtagctctttactgaaatggaaagttatctaagatatattgacatacaaaaaaaagcaaagtgcagagcagtatgtataagatgctttcatttgtataaaaagagggaaagaatacaatacacacacttataatgtctgcttgtatatgtatagattatctaatgaaagatatgtaagaaacggatacattgttgcccatggggaaatgtattaggtgaacaaatggaatgggagggagatttttctctgtgtgccttcttttaatttttagaatttgaatcatatgaatataatactaagccataaagttacatttaaaaaatgaaaattacgtcattctcttttcaaatttccctagagctccttcttagaacttatcaaaaagagtctaaattccttcactttgcattcaaggtcactgcaattggtctctagtttatatttccaggcttatctcccattgtcccaccataagtctttcaaaaggaagctttgctgtcatacaaatttgccttgcactttctattcttaatacattcatatatacatgcttccttctaacataaaatgctatgtttgccatttcaacctagcagaatttacctattcttcaacatatatcacctcttccaggaagctttctgaggcagtaatttctcagctgtgagggatttctctgtcttcataactttgcagcctctttttcttcttcccaggcaatgagaaattatttcagcacagcaacaatagaaacaacaaatatcaaagcaatacttcttacaagctctttaaatattggtgggagctgatgttagcatgagcaccaatgatgaggacacttgtgtctaactcttcagcttgcagagtttcctttctgggctgcatccttctaggcaatgcagaaacttgtggtgccatggtaggcaggtggtagtagcagcagtcttgatgaatagaaggaggttttctaaagcaccaataagaaagcaagtcacagttctgggtcctatccaagactcagtactcagtctggcctgagggctgcagacagaatcatggacagggtgctccagcactcccttgcatagagcaggacaagcacacaggccagactctcaccaacatagacttcactggagcagtcccctaacctagtaaactgattcagtatcacagagactaccagcataacgaagcttttgaaaactctgctttctttactgttctgcttgggatcttttaggccctaagcttactagttgtagcttatgattaatttgagttagttttcatcttttttttcttggtatgtgccaggtactgttttaagtactctcatgtgcattgtataaaattcaattcttttattcctgtcactccaccaaaatagctttgatcagggccattagatgtccaccatattgccaaactaatggttcattttcagtcttctttttatcagtcagcaatttgacacagttgatgatcactttcctctttttattataacagctttattgagttataattcatgtgccataaaattcaccttaaagtcccttaaaaagtattgaatcgaatggtttttagtttattcatagttaygcagacatcatcaccatctaatttcagaacatttccatcaccccataagaaacctcttacccattggcagtcactccccacttctctttgcccccagcctctggcaaccattaatttacttcctgtttctatgaatttgcctattatgtacatttcatataaatgggtttataaaatatgtgcccttttgtgtctggcatgatgtttttaaggatgctgtagcatgtatcagtacttcatttctttttctggctgaacaatatttattgatggacattttttaaatccatcagttggcggacatttgagttattattaccacttcttgcttattatgaataatgctgctatgaacatttgtatacaagtttttctatggaactatattttcaattctcttgggtatttacctagaagtaaaattgctgggtcatatggtaattctgtttaccatttgaggaactgccagactgttttccaaagtcattgcagtatttacattcccacccgtaacatatgaaggttctaatttctctacatccttggcaacacttgttattatcttttttattatagccatcctagtggatatgaagtggtgtctcattgtggttttgatttgtgtttctctagtgactaatgatgttgagcatcttttcatgtgctcatcagccatttttctatcttctttggagtaatgtctatttaagccttggaccacttttaaattgaggttttttttcgttttgtttttgagctgtaagaattctttatatattctggatataagtcccttatcagatatattatttgtaaatattttctctcattctgtgggttgtcttttcactttcttgacagtgtcctttgaagcatacatttttttattgtttttttttttttttttaaattctattggccaggtctgttggctcatgtctgtaatcccagcactttgggagaccgaggcgagaggatcacttgagctcagaaatttgagaccagcctggccaacatagtgagaccttgtctttactaaaaatcaaaaaacaattttttgtggtaaaatatacataacataaaatgtgttatttaaaccatgttttttctgaatattatgtggaacattttaaccatttaaaaatatatagttccataacatcaagtacattcgtattgttctgcaaccaccgttcatctccagaatgcttctcatcttgcaaaactgaaactctatacctattaaatagtaactcctcatcccatctcaccccagtccctggcaaccactactctactttctgtctctatgaatttgattgmtctaagtacctcatgtaagtggaatcaaataacatttgtccttttatgactggcttattccacttagcgtaatgtcctcaaggttcayctatgttgtaatgtgtcagaatttcactctgaaatttcactctggaatttttaaggctgcatcgtattccattgtacacatgtatcacattttatttatctgttcactcatcaggacacacattgcttccaccttttggctattgtgaacaatgctgctataaacagtggtatacaaatattttttgagtccctgctttcagtcttttggctatgtaccccaaagtggattgatcaaattttatggtaattctaattttttgaagaatcaccataccattttccatggtggctgcaccgttttacrttcccaccatcagggcacaagggttccttccaatttctctacattttcttcaacacttgttattttctgttttgttttttttaagtaatagccattgtaatgggtatgaagtagagcacaaaagttttaaattttggtgaagtgcaatttatccatttttttcttgttttgattgtgcttttggtgtcatagctgagaaatcattggttaatctgaagtcagaaagatttgctcctattttttttatgagttttatagtttttactcctatatttaggtctatgatttttttttttttttttttttgagacggagttttgctctgttgcccaggctggagtgcagtggcgtgatttcggctcacagcaacctccgcctcctgagttcgagcaattcttctgcctcagccttctgagtagactagctgggattacaggcatccaccacgaagcctggttaattttttgtatttttagtagagaggaggtttcaccatgttggccaggctggtctcgaactcctgacctgaagtgatcttcccaccttggcttcccaaagtgctgggattagaggcttgagccaccacgcccagccagttttgagttaatttttgtgcatagtatgaggtaggagtccagctttattcttgtgcatatgggtatctagttgtcccagaatgatttgttgaaaagattattcttttttcattgaatagtcttaccactcttgtcaaaaatcaatgaccataaatgtaagagtttatgtctggactcaattctattctattgatattcagtctgttcttgtgctcaattccttctttttgaaacactttcttcatttggcttccagaacacctctctgtcttggtttcctcctctcccccaacattactggccattccttcttagttatctttgctcttcctctccccaaccttgtagcatcctgggattcaatcttgacttcctatgctcacttcctagatgataatctttcaatcccgagtttcataagcattcccaggtttatatctccaacccaaacatcttccatgaacaccagactccaaatccacgtaacacctccttatggatgtaaataggcatctcatttgacatatccaaagccaaactcctgatccttcttctgaagcccctgccaaacctgcctttcctattgtctttcttacccatgagtggcatctttattcttgcagctattcaggcccaatccatagagtcattcttgactctcccttctctctcacaacctgtattcagtccgttagtaaattccacttcctccacttttaaaaaatatcttgaatcttgccattatctctacctccaccactgtcatccttgtttaagccaccattttctctcatctagattactgcagtggtctcactgctctccctgcttctagaaccttgtccctctacagtctgttctcctcacaacaatcagagtaatccccatagagcatgagtcaggttatatcacctctctgctcaatgatttcctgtctcactcagaatggacaccagcattcttataaaggcctgtagagccctatttgaactggtactttattgcaaatttgctgtttctccacaccaattatgctctcacctcaggctttgcatttgctatatgttcttccgaaaatactttttcccagaactccaaatggcttctttactcatttctttcaagtctgctttgatatcacctatcagtgaggccgccctaacaaccattttttggatttttaataacaactctacctccatcatcagggggcattatctttttcccttatctgaatttttcagccaagttcctatcacatgtgacatagtatattgttatttcttatggaaagcagaccctggaacaagaatgtctgttaggaattttggctttgccacttgctggcatcttgcttaacctctctgatcttcaatttaattatcaaagaagtggaggtaataatggtatttacccagtgtggagttgtgagaaataaatgagcttacccaaataaaatgccagatacaaaataagtgtttgattagtatcagctactgtcatcatcttcatcattgtttattatctgctcctcttactaaaataaaagcttttcaggatcagggagtttgtgtcattcactgccacatcaccagcactgattgagaacagtgcctagtgtgcacattaggttcttttaaaatttttttagttaaaaattttttttgaaagacagagtctcagtctgtcacccaggctggagtgcagtggagtgatcagagctcactgcagccttgatctcctggtctcaatggatcctcccaccccagtctcaagtagctgcactgcacgtgcaggcacatgccaccactacaggcatatgccaccacacccagctatttttttcatgttttgtagagatgggggtctcactttgttacccaggctggtcttgagctcctgacctcaagctatccttcctcctgccttagtctcccaaagtgttgggattataggcatgagccaccatgaccagcccttagtataataggttcttaagaaatgaatccttgcaataaccctgggaggtagttgttcatatacctrtctttttatagttaaggaaatgtaggctcaaataagttgaacgtctcaagtcttttgactctcaataatggagttaagattgtattattgggtatactgaggggagtgctgatgaggaggtatgtcacttccttataaaatggactgtctggaasagtgagagagatcattcttagggggtcarggattttcctgcaaagcagttgttttgtagacatttataacttaacctgcaaactaaatctaagtggaaaaatcctaaggcattttagggagttgggaagcacagaaagtttgattcttaagaaaaaaagttgttttttaatgtttgtccaacgggtaggacaaactgaatagccagtatagcagttcctcagggtctggaaaatggtacagactactggttaagagacttataccttctctggttgggcaagagacacttcttagaatagctgttgttttctaagtcctgaaagttatagttttcttttactacatagaaatgataggcgatgtgctaagccctcaggctacaaaggtgaaataatatataatccttttttctgaagaagtagtataaagtgagaaatattataaaggaagatgtttatacagacaactacaatatatgatactacaaaacagtattaacaacatactgtcttagaagtgtggacatagaatggtggagaccagggcagctagtggagaggcacttaatcctaccttgggaaggaaagcagacagaaatttcacagagtcattagtatttgaactaagtcttagggaatatgcctgagtccacccagtaggctgggtgtgggagggaggtgtgaaaagtctcagatgtgatggagaatgttcagtaagacttgaatacaggacacgtgaggagcggaaggaaagtaagctagaacggtaggggaagtacaaatcttgaagcactttatgtgctacagtaagcaacggggagaattgatgcaattaagcaaagaaaaaaatgcgatcagaatttcgaaatgggaaatgtggagtatggattggagaggagcaagtctagtggcagagagatcagcttggagtctcctgttatagtccagttaagagatgatagtggcagtgtgaaatggaaaggcagcagtggatgccagagatatttaggaggtaaaaagtacagggctgagtgattggatagggacagagtgcagagagggagagatccattgtctgsctggggacaggaggagacgtttagagatggaagatagaagtttagtgtttggatatgttgaatttgaactaagcatgcgatatctaggtgatacacactaagcagtggttaatgtgttgtgataaagtaggtatctgaaggttaggtataactcctttgagaagtggaagagggagctgactaatggaagaagagacttatcaagtgacacagagggcccagttgaagttaaaaatctgcatctagggcggggcgtggtggctcacgcctgtaatcccagcactttgggaggccgaggtgggcggatcacaaggtcaggagatcaagaccatcctggctaacacagtgaaaccctgtaaatacaaaaaattagctgggcatggtggtgggcgcctgtagtcccagctacttgggaggctgaggcaggagaatggtgtgaacccaggaggtggagcttgcagtgagccgagatcgcaccactgcactctagcctgggcaatagagcgagactcygtctcaaaaaaaaaaaaaaaaaaaatctgcatctatttgctctggttctcatctgtacaatggtgggacttgtcaaggcattatgtgttaaataccaatgagaaggatgaatgtaacttaggtgcactaggatggccttattaactcttgcttgggtgggcatcagagaaggcttcccagaactatgcyttggaggaagagttggattttcctctatggaaaggaggtgtgagatgctatttcaggctaatggaacagaatgagtaaataaaaatttggggttttgagtatgtgacgtctttgtgaaacaagacaattagattstaggaatgtatatggggtcaagaaagagggcagaggagaggaatttggggatttgggccagatcatggagagccgtgacggctctgtcaatggattgatttgattttaatctttaggcattatggggaaacctgtggagaacagaaggacacaatcaactttgacatggttgtagaatatatttaagatagtgaagggggagaggtacatttccagtttgagtcatggggtcagttaaaggattgtttgcctaattttcttactcaaaaggaacacattatcctgggggggttgagatgtagatatggaagagatatgtccccattccagggagtgtctttctcatctttcccaccttcctggagctgcactgttttggaggattccttgtcacctagtccaggacaggtgacccattaagtaagcagaaatagcttgaaaaattgggaacctgtgaattcgattcttgaattctcccctctacttgtgatgtgacatcaatgggcctttaaaagagaaaagaaaatggaggggcactaatggaccaaggtgggtggactttccttacagaaggaagcctgtgggcctatccatgtatggcctagaaggcaatgtagtctctgatgaataggaaaggagtaatctctgggctttatttttatcctgttatggcttgatcgggcccttctggaagtgtcagtttcctttagagtattgtcctgggtttgataaataatcagatttgggattgcagtcatggttttatcatctagatcactgtgatttctattaggaaagcagccagtcgatgcccccaggcctgtagccattcagcatcctggtcctggacttaactccaggccctaccctggtccaacttaatttcaggtccgagaaacgggccagagctcattgagtgaatgcatggccaagcctgcattgcaaaatggaaaaggctcagtcaccagggcctttggagtttgaggacttataccagatctagaataagctcacgtggcttctgaggaaggaaatcactctgtgctcagccagcttagatagtctgttggagtggtcattggtaacaaatctggtcttgcaaccttggcagccctgacccttgatgcaggccactttggaaatgggaaaaggatgactggaacccctgggtagattttgtcccttgatttagtttggaacatctccagggatgttccaaactaaaaatcctgggccagcaaatacaggcaggaaggattctggaagccagtcagctgggctctatgaactgcctagttgtcccgaggacctctccctctcttccatgtcccttggagtttagctggcattttctttgggttccctacttataggactgactctactaacctttctgcccttttttctgctctttctctccttgcagaagaaaagcgaggagcccttcaggttgtgcctatgaccctttgggtcgtccttttttgtctatttccctcccctccttcccaagcactgtatgtgtgtgtgtakgtgtgtgtgtgtgtgtacatgcacatgtgcgtgcatgatctgtgcctctgagctttggctcatgcagtctatttttctgaaaagcagtttgtgtgcatgctccttgcttgtgtgtgctcctgcagatatccctggagcacactgcgagaatgtgtgtgcaccagcatgggtgtgcattcaatgtagcatgtgtgtgcttatactcagtttgactcccccagacactgattaccctccttttctcctactcagctcagtgtgtgtccattttctacctgttgctgcaaactctggcatatgctgtaaaaccttggctgagcccagcacgcatgtgtactttgtatttgagagcaggctttgctgcaggcatttcctgcctcttgcctgaggccctaagtgtgaaggtacttgtgctctgaacaggcttcctgacctctctgttgagcacaggcttctgtagccctgttacgtggtttccccaaaccatgtgaatgcatagtatactaatgccctgtgcttgcaagcactggctcttgaagaccatgagggtttgctttgcctgtgatttgggccatagtaaacactgtgaatcctcctcagatgagtttctgcagatcactgaatactctgaagcttatgttctgaagccataagcctaggatccatgctcaccatgtgtttccttcagacacaagttgtgtgtactatgtgtgcaggcttttgcagacatgttgttatcccttctgagcacaggaaatgtgcatgatctgagccaggttctcagactttttgtgactttgtttccttaagcccagtggtttctggcaaatatctcactctggataggaaataagaacctgctgagtacggtggctatttccagagggaaaataagttctggttggtaagatctggggatttagggattggctccccaacactcaacccttaccccttccataagcaaccttagaagacttgcagcttttctgttatttcccacctactgttgtttcttcccacctactgttgtttcttctatactatccccattgtcttttgcttcagccacttctggctgccttttggacctggccctcccattaccaatatcatcctacctatagaaaggataggaggcagatggggtggaatgggggctctggtccgtagggagataggcttgattaaaacatagacaacctaagaggagtcttaaatccaaaattcatgtgagcctattgctgacccaggtaattctccctcacttttccatcaccattagctctgtcctatctgtccctattctcctctgtattgcctcattgttatccataacttctccccactttagctctccaaaacatcactcactgttcaaagctaagcaccttaattctgcctcccttctggagctcatttgctccaggatagttaggaggcagggaagttgttgggagtggaagaaaacaaggaggggcaggaagccccagacctgttagcctgaaaaaagcatgtgctattggacctctggagcactctggcagctttggacctttctgcatgctgcttgaaggatttgcttttgtttattttgttttcttttggtacagaaacctttaaaaggtgatttttgaactgttcccttccttgaattatttggtgtctcaagtttcgacttctcattctagggcctatagaattcactagaatgataatccaagtgtctaatctaccctgggttctcttgttatgtagaatttattaaatagagagaatatacttagtgtcagtgagtcagaggttcaaggcacccaaactaaatccaaccacaaaatgagataggaatccagagagaccaggtctgactctgggacattaagggagtttaggaatatagctggaagaagactggactctatatgaaggtgtccttttgctttagtgaggcctggaagcctaagtaggcccttctcctgtgcttggtttactgctgtctacactaatggctcatataagagtgatatgagttctgccattccagtagacttcagccctgcaaactcagtgagctttgccctatctcctattcaccaaggagacaggtaccactcatttcagcagcctgcttgttgccctgactgatcaggacattggtttagatgtcagacaggctgtcaccacatggtgaatgtgacttacactgctctgggcttgtactctactgctcgctgctcagattacaggcaatctcccatctttcccaggatctaacttgtttcctatctctttttaaagattccagatgatggtgacccctctctgcctcagtggctcccggaagggtaagtaattcactgcaaggtttctgtggattttattcagtatctcttgatgcttttagcttttcccctgggaagcaggggaaccagcttcataagctgcatcctggggaaggaaaaggttccactataggttggttggttctctgaggcagaggagagaactctgctgatggattccttggaggcagaagagggaactttgcagaatggttaccctggtgcaggggagggagctttggggccttctcatccttgcctctataatttctggtccatcttttcatagtggtgaaatactctttaagtagaacaaagaggaaattagaaaaatatctgcatttggaaacattttctttccatttcatttgtttttaatttttgtaggtacatactaggtgtgtctatttatgggttacattagatattttgatacaggcatacagtgtgtaatactcacatcagggtaaatggggtatccatcacttcaagcagttatcctttctttttgttacaatccacttacactcttttcgttattttaaaatgtgcaataaattgttgttgactgtagtcaccctgctgtgctatcaatactagatcttattcattctatccattccattgttgatggtgtggctgattaagttactcctaggcttgatcctgctccagctgttgtgagtcatctacttattccattccactgtagtcaggatataagtaacacccctttctgagctctgtatgttctgtccgtgcttcttgtttgggagtttcagacctgtgtgattgtaccagagtcattttaagctgctcagtgtagcctgtaactgactgttcttaaagagagaagagagttcaagtaccttcycattccccactccttcccacaaataccaccaattagttatctagaccttccttttccctttttcctacaaaggcttctgacatcagaagtctcagtagttgcttcctcttgtggccagggaagaagaaagatcaggtagatgatctactatatttttacatgctcctttcccttgcaatttgtcatctttaaaaaaaaattttttttaacttttgttttaggttcaggggtacatgtrcaggtttgttatatagttaaactcgtgtcacagggatttgttgtacagattatttcatcacccaagtactataacaatagttattttttctgctcctctccctcctcctacccttcaccctcaagtaggcccgtgtctgttgttaccctctttgtgtccatgtgttctcatcatttagctcccacttataagagagaacatgcagtgtttggttttctgttcctgcattagtttgctaagaatagtggcctccagctccagccatgttcctgcaaaggacatgatctcgttcttttttatggccacatagtattctgcggtgtatatgtatcacattttctttatccagtgtgccactgatgggcatttagcttgattccatgtctttgctattgtgaataatgctgcagcgaacatactcatccatctgtctttatggtagaacactgtatattcctttgggtatatacccaataatgggattgttgagtcgaatggttgttctgtttttagttctttgaggaatcaccacactgctttccacaacggttgaactaatttacactcctgccaacagtgtataagtgttctcttttccctgcagctttgtcagtatctgttttttttttttttagtttgtcttcttttaatcaagggtgaatcattgaatgagctacccccttcttcttttattgaaagatcatttatgtttaaaaaaaaaacttcttgccttaagagatacatattgtagtttctagaattagctacaaagttgtggcatcagttgcttcttcagtgatctttagtttttttcttctaataattgkaaaatacacacatgtcaatgggacatatccagactacttctraatgtagctatgtagtagttttctaaatgattccctattgkctttcttccttttctttcaccttcgtccttagaagctgtcctaagtatagaacttccctcagtctggtagtctcattaaaaacaaagcctactgcctatgttcagggagctgtttyattagaaatcagcatattgagtggcctgtttcaactcctggacttgacccaatttgtggttccattctttgcctagatagctacaagtacctactttttctgttgggatatttctgtctttagaccagccgtggtatacagcccagctacccaactttcccaacgtctttgctctcattaaaaccaagtacatgagttctttgcattaaggccagagagttttttgttgcttatccatctcattttatagaagcgtcaccaaggcccaaagtgaagaaggaattttgggagaagacatagtacattaatagaagaactggagttaaaatccaggttatttcagtgtagtttcttttgggtacattttctgtttttattgcatattgttataaaagaacaataaaattaatcagtatagaaaaggtgtaaaagttttagaaatgtccagctgctgtagctgtaatttttctccaggctctgttgatgtgtccatagggctaggccacactcatacagtccctttgctgtttccttcctaaatggtgttttgttttgttttttcttcccttaggtggtcttttggaagtctctcataccacctcccctattacacttgattatgagggctcctttctccatggagaaggcttttcttcaggaggcctaggtagacagaactggtgactcttttactcttggatggagacggtctccttctatgtgccattgtctggtatagtcttactcacctagactcttgccgtagagccaccctgtgggttctgttctagcacagccttggcaagacttatctttggggagcagtgtctttgccctgaatgtggggagaagccctcttgagtgccaattcctaccttgccttatggagcataaaagtgccttcaaataaatagaaatgccttgaactatcactgggataaaagagcctcagttctcagctgaaactgtaagagacactgaggggtcctgtgagaacagattctattgctcactcttccatgactttatttccctgactttctgtctttccttcccgtcctaaaagcacatggtagaggtcagttcatcttcctctggggagagggagagcaaggtgaatggaacactgaacccaccagctaactcaaagcaagactgacggtcctgacatattttcttctctcctcaggccagccggagggctctatggcattgacagcatgccagatttacgcagaaagaagccactgccacttgtcagtgatctggtgagtgaagactcttgtgcaggcataggcagtagccttggggtatcccccattgggccttggcaagctgtcaggattggaagtcgtccatttaatgactcaaattgatctgatgatcaatcatttaaagccttcggagacttagcagtggcttcacagggactgtgttctacctcactccctagtcagagtcctgaatttattagctcaagctcctacctggaatatttgtgacttgggctctcaaagttaggattttgtgtcttcctataggcatctagctcttataggtatctctacagccttctttgatgacctgtaatggaaattgcctccagcccttgacctcttgatcattgagcttggtatgggatgagcatgactggagcttgatgccttcttggaagtcaagcaaaagtctcttctcaagacataggcttttgagactatctctgtaacctagtgtcaggcactgagaggcaatgataaaaatttgtggaattgaattgaaacaggcttaagagttaaagctgatcccagggcctccatcccatcctcccaggatgaccagaagccccattctgggtcataccttctgaggcacaaacaacccaaggaattttctgtagccttgtgggtagttgggggtgaagtgaggtccaggttctctcagagctctaaagctagaaatcgggtgtaaggattcagttaaatgtgaacccttttcccttattaccattttctgtttctgttttcttttttctctctattctatctattgkttttcctaaccacccctcttccctcttccccatttcctgctccactagtttctccctccttagttgaccgaatgaaagtatcatctgccattttctcttcatcatttttcttcccttccattatttcttaccatttgttcatcttctcctttctctctctttctttctttctttttttttttttttatagagacggagtccctgttacccaggctggtctcaaactcccgggctcaagtgatcctcctgcctcagcttcccaaagtgctgggattacaggcgtgagccaccatgcccgactcctcctttctaatgtacctcttcttccactagctcttcatctagctggttgaagataaattctgatgccatgtcttcttcaataccattttcctttccttaatgtctctcatctcctcttttttttcttcctcttcttcctactttttttcctcatcctttctcactgtttgcccatgagcaagtatctagtttatttcttgctatccctctctgtcttttgccctatctttggctttatggcataatactccttagagtaggtgctctaggctttgggtcctggccagtggtctgggttgaagacagtttttagtggacagaagcagagtggattgggaaatgctccctgctttggactatagggaagaacctctcagttgcctctgaaagttttcatgccctttcgagcctttaacatcatgttgttcttttctctgctgtcctctacgcaggctatggtgagtgtctccagagccctttctcatcctctttaaaagtctgcatccctggctggttgcagtggctcatgcctgtaatcccagcactttgggaggctgaggcgggcggatcacaaggtcaggagttcgagactagcctgaccaacatagtgaaacactgtttctactaaaaatacaaaaaaattagccagccgtggtggcgagtacctgtaatctcagctacttgggaggctgaggcaggagaatcgcttgaacccgggaggcggaagttgcaatgagctgagatcgcaccactgcactcctgcctgggcgacagtgcaagactctgtctccaaacaaacaaacaaacaaacaaaatcctcatcccaaatcacttgggcccttcccagctgttcctcctgcttaggctgatattatgacttctgccttctcagcgtcctctgcctttaggaaaccatgtgcctctccaggggctgcccctaaagcttgggcttggcagatacatgggccctgtgcaagagtgtggctagcaaggcagccccagctctcagacttaactctctgggcttggcagatacatggggcccctgtgcaagagtgtggctagcaaggcagccccagctctcagacttaactctctgggcttggcagatacatggggcccctgtgcaagagtgtggctagcaaggcagccccagctctcagacttaactctctgggcttggcagatacatggggcccctgtgcaagagtgtggctagcaaggcagccccagctctcagacttaactctctgggcttggcagatacatgggcccctgtgcaagagtgtggctagcaaggcagccccagctctcagacttaactctctgtgcttggcagatacatggggccctgtgcaagagtgtggctagcaaggcagccccagctctcagacttaactctctgggcttggcagatacatggggcccctgtgcaagagtgtggctagcaaggcagccccagctctcagacttaactctctgggcttggcagatacatgggccctgtgcaagagtgtggctagcaaggcagccccagctctcagacttaactctctgtgcttggcagatacatggggccctgtgcaagagtgtggctagcaaggcagccccagctctcagacttaactctctgggcttggcagatacatggggcccctgtgcaagagtgtggctagcaaggcagccccagctctcagacttaactctctgggcttggcagatacatggggccctgtgcaagagtgtggctagcaaggcagccccagctctcagacttaactctctgtgcttggcagatacatggggccctgtgcaagagtgtggctagcaaggcagccccagctctcagacttaactctctgggcttggcagatacatgggcccctgtgcaagagtgtggctagcaaggcagccccagctctcagacttaactctctgtgcttggcagatacatggggccctgtgcaagagtgtggctagcaaggcagccccagctctcagacttaactctctgggcttggcagatacatggggccctgtgcaagagtgtggctagcaaggcagccccagctctcagacttaactctctgggcttggcagatacatggggcccctgtgcaagagtgtggctagcaaggcagccccagctctcagacttaactctctgggcttggcagatacatggggccctgtgcaagagtgtggctagcaaggcagccccagctctcagacttaactctctgggcttggcagatacatggggcccctgtgcaagagtgtggctagcaaggcagccccagctctcagacttaactctctgggcttggcagatacatggggcccctgtgcaagagtgtggctagcaaggcagccccagctctcagacttaactctctgggcttggcagatacatggggcccctgtgcaagagtgtggctagcaaggcagccccagctctcagacttaactctctgggcttggcagatacatggggccctgtgcaagagtgtggctagcaaggcagccccagctctcagacttaactctctgggcttggcagatacatggggccctgtgcaagagtgtggctagcaaggcagccccagctctcagacttaactctctgggcttggcagatacatggggcccctgtgcaagagtgtggctagcaaggcagccccagctctcagacttaactctctgggcttggcagatacatggggcccctgtgcaagagtgtggctagcaaggcagccccagctctcagacttaactctctgtgcttggcagatacatgggccctgtgcaagagtgtggctagcaaggcagccccagctctcagacttaactctctgggcttggcatatacatcgggccctgtgcaagagtgtggctagcaaggcagccccagctctcagacttaactctctgggcttggcagatacatggggcccctgtgcaagagtgtggctagcaaggcagccccagctctcagacttaactctctgggcttggcagatacatggggccccctatgcaagagtgtggctagcaaggcagccccagctctcagacttaactctctgtcctgcttgatttgactgaggcttcaatgcccttttcacttgccaagtgccctacttgtaggcctgctggcctctgcagccatccagggattatgtgggcttggggaggtgccaaggtatagaggttagcatggaatcatttttctccataatggctcttgaatgtgactctgacagagttgtgtgtctctattattcttaattacctgtttcctactatagttctaagcttttcattttcctttgccttcccataaacaaggagtttctgtggggtaggacactaagaagagtgaaagaaaaagaaactctttggatgatagataccctgaagaaagtgctgttctaacatagttagagcagccccctgagggccttgggttttgcatcttaacctgggacacttgtcacctgttarggcggttgctgtgagtgacaataaaaatagaaagtactgtagtaagctatagtcaagtggctttggtcactgaagctccctcccccrgactttgccagcccttggcagtggtcagggctaacagcagatcttccctgacagtcactggtccagtctcggaaggcaggaatcacttctgcaatggctacacgcacttctcttaaggacgaagagctggtaagtgtcccaagtgctttcgtaagtccactggcctcaggactggtgatcatctctgtagccatgctattaataattgggaattctgggaattcaagagtgctggacacacaytgctgatgaaaaagatagatagcatcaggtgttagttttccacactgggaaagactctaagcaagtctagatcagagagtaagcccaagtctcatgttgaagggtgtgaccactgaactcaaggttttrtgatggacctagtaycttctgttttcttagaaagcgtgaatgctggaacaaggctcggatccagcatcaggtccaacctgtgttggacaaccagaagcacactatattgtgggcctcattctgctatgctgggctctgggctgggccaggatagagcatcttcttcattgccagaggagacacgaaatcaaggtcctgattgtcccacagggtctcagttctggtatctccctgcagaacccaaaagtcatggggaccrggcatgttggcttatgcctgtaatcccagcactttgggaggccaaggcaggtggatcacttgaggtcaggagttcgagacaagcytgaccaacatggtgaaaccctgtctctactaaaaatacaaaaattagctgggcatggtagcatgtgcatgtaatcccagctacttgggggccaaggcaggagaattgcttgaacctgggaggtggaggttgcaatgagccgagatcataccactgcactccagcctgggcaacagagcaagactctgtctcaaaacaaacaaaaaacaaaaatcatgggatggggtatgtgtctttcagaaatcccacgtgtataagaaaaccctgcaggccttaatctaccccatttcgtgcaccactcctcataactttgaggtctggacrgccactaccccaacctactgctatgagtgtgaaggcctgctctggggcattgcccggcagggcatgcgctgcagcgaatgtggagtcaagtgccatgagaagtgccaggatctgctcaatgctgactgcctgcagcgtgagtgccctgcgggatgaggggcggggagtggggcagcaggggctttccaaaatagtctgcagcaaagagctgggatggctgaaccaatcattcccccagtccacctgattctgaaaccctatccatttcagagaaggtaggattctgaatcaaggggcattgcctttccaaataacaggtcttacactaccttcttaagcacctttaggaaaaattctttgagctttctgtggtagtgtagctagaatcttataggattcagttgatcccagagactgagctttgtagtgtatacagcacagcggccttattgtccaaatgacaaaagcatcaggatctgaggctaatgagaggaaagaaatagagttttgtggggttccaggccccacagaggaacctcctaaagcctagaatctaggactcagggaaggcagcattcattacttgtttttagacaatagtgccagaaatagaaatgtcaaatgaatctggtagaggtccaagaggagagtataccagacccccagggccttggctaaatatatgacttgtcctgccatgatggagtggggacaataggagcaggaaaagcaacaagttcttgttagaggaaatggtagcgctcaaagttcatatctccttgctcccctcctgctggccttgcactcactgtggctggaccccaggaaaagcaggggtgaaggaagtgggaaactattttcctgccctccagacctcccaggtattacccacaagccaagctgtagcactgaaagctttaaagattgtgctaggagaagggaaggtcacctctagacccacaagtacttcattatcccaaggacagctatgacatataaaaggggaccagggagaggccttgagcaattattcatggaaaatgtcctttgaagagcctcaaattggtgccaatggcaaggctaggttagacgtgaagagacaggtaggacagagtcagcggaagagatgggctctgaaaagactgcctgaagacaaatgctagtaatgacttggccaaaatccatcatgaaggggtggcaagtgcaggtgccagagggcccttgcttaattgctgagaactagcaaccaggctggctgcatagtttctccactgctctgcagcctctcccaggccccattcctcagctcaacccttggtctggtaggtgacctgttgtgttcctggccaccttcaggggctgcagaaaagagctgtaaacayggagctgaggaccggacccagaacattatcatggccatgaaggaccgcatgaagatccgagagcgaaataagccagagatctttgaagttatccgggacgtcttcacagtgaacaaagctgcccatgtgcagcagatgaaaacagtgaagcagagtgtactggatggcacctccaaatggtcagccaagatcaccattactggtgagcaggccacagtttgaggggacaggaaggcctgggctatggggaggagactggggaagaaacatcctgagcgtgasggagcaagggattagggagaaagaaaaaggaaatcactgggaaggaaaggcytctttattaatcacttctccttacctagaccctggtgccggagaggcaagattgctatctgcaaacaacatgaaccataatacaaggatttgctaacaacctaacgctgtagacttggctaacagtttgatattataagaggtggggggagggggaaggggaagggcaggggaccagggagtagctaaccagtggtttgctaactgggtggggctgaagcatgtatatatcagagggtgtaaagatcaatatagagataagtggtcagttagggcttgggtagggagatgggatgcttgggctttaagggaaaggctggtggcccaggacraagaataaatatggaggaatgggattacggtatctgtgcaaggagcatagactgctctaagatggaaagcatatgagtagtgttgtggggggcttctgaacgactctgaagcctcctatacatgcttgggttgcagtggtgtgtgcccagggcctacaagccaaggacaaaacaggatccagtgacccttacgtgactgtgcaagtcagcaaaactaagaagcgtaccaagaccatttttggaaacttgaatcctgtttgggaggagaagttccatttgtaagtcacagagagctttgtcttacctgggactgtgtgtattgggggagcaggatcacatcctgccattctgggcttgagcttgaagattgggcaaaggcaggggagaaaactcatttctcgcatgcttcgttcagacatcagccattctttctctggttttcttctcatgagctgttgtgtcaggattactgtgcccatgccctgtcttcaccagggctattaaaggggccctagggcaccccatcctgctttttctagcagtagaaagattttactactttactgctcagtgacagaaccagggactgactgccttattgtacctcctacccttgcctaggaaggtacagtagggttaggctctcataaggaaggctcttataaggagtggggagggagtgtccttgtcctaaaactgggtaattctggcttaaaagtggaaatctgggttctgaagaagatgctgtttcccataaagatagtgtttcttcctgcctcagcttctacactcactcatttttttattatctcactttcttacaaactatttcttatgacagtaaaggatggttattgaaaaatggcaaactaatgtctgagaatccacatgctttgtcgctccctaataaggcctagggtcaggattttggatttgaatcagccaagcaggctggctatgtagaggcctccttctgttggctcctcagaagattcagaaagggattaaggccagcgtggtggctcacacctgtaatcccagcactttgggaggctgaggcaggcagatcacctgaggtcaggagttccagaccagactggccaacatggcaaaaccccatctctattaagaatacaaaaataagccaggcatggtggcaggtgcctgtagtcccagcttactcgggaggctgagggaagagaatcccctgaacctgggaggcagacgttgcagtgcaccaagatcatgccactgtactccagcctggtgacagagtgagactccgtctaaaaaaagaaaagaaaaaaaaaagggattaggatatagtaaaattcatctctaatccagagataatattaatagctaccaggagaaacacctgtttgagaatctgaatagttcctgcttgaattcttcttatgactaatttaaaatgaactagctcttggtcatttttgcccacttttagtaaacagtttattaagctcatattctgtacaagacactatacataatacagtgtatccaaaaatgaatagaacaatccctggcttcaagaagctccttgttgatttgtctattatcttctcacagagcagtggttatactgtaatattttaatggaatgtggaaagataacataagaacatagggaaagkaagagcacattttgccagttacaacttttgggtgaaacaacagatcccagaaagcaactgttggagaggagagcttgagacaagacctgggaaaactcctttctccaaagcaaacccgatagacgagatgacaattcaatgggatatgataggctaatatagaagttcaccaagcacatagttaggcagatgagagagttagatagaaagccaaacagttataaccctatgggcctaccatgracatgtctagcacctttactgacttcatgtcctgggctctgaggatggagctagcagttgcttcctggagctccgtggcatgtctagctattttcctcttggtgttgctgatacagctagctgtataggaagtcagaattgacctgaattactcttccctccaccccttgccctttgttctaggacaataagaactgtacagtggtagatagagccacccaggccgaggaatgaagagtcatttgctaggatagcccaactttcttggaacttttgtactgctgtcctctgacttctcctctttcagggcctcaagtgcagctgtcggagcttttgggagggaataggaagtaacaggatttggcgctactgggtctgcccctaacagagcctgcctaattctctcacagtgagtgccacaactcctctgaccgcattaaggtgcgtgtatgggatgaggatgatgacatcaagkcaagagtaaagcaacgcctaaagcgagagtctgatgatttccttggccaaaccatcattgaggttcggaccctaagtggcgagatggacgtctggtacaacttgggtgaggaaactggaccygagaaagttgcttggaagggaaagcatgaaggggacctgggaatagtccttctaccaaaaccaccatctgtccccaaagcatacctctatacagagcctgtctcacctgcaaagaactgactgtggggagggatgggggacagaggagtggcagtggctgtgagtcactctggctgaatgttctctaggtttcagaaggccctttaatcttcatactagtgcttttgtcccccctccacactcctgttctcctacccagctagttcaagggtacttgtggaatatgtggtcactggagtgattcaccctatttggtgagtccttgggttggccccttcttttycttgggttggccccttctcttccttgggttaagccagaatggaactatctatgctgtctagytgcattggtgtcaatctccagtctyctttccttcctagagaagaggacagacaaatcagccgtctcaggggctatccgactacaaatcagtgtggagatcaagggggaggagaaagtagccccataccacgtgcagtatacatgtctccatgaggtgagccagcccttggtaggtgggggatcagaaagcagtgctgggagaggcctttggccataagtaggattgctaggtggttggaatccgaggcccattttaaattttatccttgattcactctgttaccctggagagtccgagtgactgaactcagactgcattctcttccactaatgtgagaacagcctactggggccacaggaggaactgagcaatgactggaaggacagaatttctgtgggaccttgtgcacattcttctgggctttaccaccaagtttgtttttgtytttcatatgtgtttaacccattccctttctctgctctgtctcctgcagaatcttttccattacctcacagacattcagggcagtggaggagtccgcatccctgaagctcgaggagacgatgcctggaaggtgtactttgatgagacagcccaagaaattgtggatgaatttgccatgcgttatggcattgagtccatatatcaggccatgacgtgagtctctgctgcggcaccgggaagtggctactaatcactggggtggctaattaaggcacactgacatggtgggcaggtccttagtgaggtagcatgcagtgattcctttactttcctctctgagctgggtgagatgggtctatgccccaagacaagaagggtatatgtagaaaaagaatgttgtaactcacagaaaaggtatttctgtctgcctcagagttgagggaactctgcagggaaagaggcatgtgagagtatgcaaggacaacctgcctagacatcacaggcctgagcagacagggtatgtgtgctcgtgtacatgtgtttgtgacaaccggtctggcctagactggcctgggggttcaaagagaacactaaactgcagggaaagcagctgtgtatggagttgaccaggactccttgaatgggaattccagattgctatgagaagcagggtagcctttctgtcagtgaggctgcccctagagctgtgtgcagaaagtagccctaggcaagagagggcagcaattgccctggctgtgcttcatttatcccataaacttttagagttcctgcttggcttttgctgcaagccctgaagagtctttgaggctgcgggtgctgtgtttttcaggcactttgcatgtttatcatccaagtacatgtgtcctggtgtgccagcagtgatgagcaccttactggccaacatcaacgcctactaygcccacacaactgcctctaccaatgtctctgcatctgatcgctttgcagcctccaactttggggtaagtatcatgtaaacacatatgtctgcatttgttaccaattaataaagtttgattttttttttttttttttgagacagagtctcgctctgttgcccaggctggagtacagtggcgtggtctcggctcactgcaacttctacctcctgggttcaagcgattctcctttctcagcctcctgagtagctggrattacaggcacccgccaccacgcccggataatttttgtgcttttagtagagatgggggttttgccatgttggccaggctggtctggaactcctgacctcaggtgatccactcacctcggcctcccaaagggctgggattacaggcttgagccaccgtgcccagccaagtttgatttttcttggctggtcctatagagttacttgatgtgcttaaaattcagatagctaccattttgatagatgaatcttgtttcctgtttccttatgggtatgcggrctatactaatagcctctcctcacacacagataaagaagagaaggtggttgggggtggtaccacctgggcttggccagaacccctctgggccaacaacttggttgaattacgatagtcttccatattcttcagtcttgcaggtccacaaatggatttttaaaaatcttgttcagtctgtctgtgatggattcatattacttgagttgatatgagactgatgtctaagcaatgatgccagtgtgcacttgaacctgttccttttctagtgtccagactgttttccctatccagggtgtgcccttcctgggttaaggtacctgagaagttgagtcattactcagaatgtcacctgacattaattcagtataaactagataaaataattctgacccaacacaaaaattaccattttgggcataaagttactgatatcaccccaattcactgagtctatgaaatctgacttttttgtactaatgaattttttgttgttgatagagcctttctgtagatgtgtaacttattaagccagtcaaatatttgttccattttgcctcatctcattatgtattgacttaatcaacatctactcatataatcaatatatgagttctaggagtgggatgccaacatcctgcaggcatatgattccacgtttaattatactttttctatgaaaatcagctattaaaatagtatatgttagatattttaacatttaaaaagtatacacttgggaaatgtgtgtggaatgtggtttaaagagagaccccttcctgcctgtcctgttatctttcatatgcatcagattctccctcctatcatcactgctaggctgtggctgtataactgttatgcactaccccgagataagtcaggagacctcagactcaagagagaatgtgtttggagtttcttcttatctaactaagataagttacagtcccaaaggtatagagatgcactggtcatgccctattgactctcatatagaaggagccatttctccccccagggacttggctttttccttgtcagtgtgagatttcccagattgggacagagctgcaaagagatagaacagggactttctatctcattttttccgttacactgtttgttgttcttcccatgggcagggatgtgtctccaacccaatgcctcccgactctttctactcatccaggggtggttctgtttctgttatagtttaggggactcagacacargttctctttttcttcccctttatttgtttctcaccctcagaaagagagatttgtaaaactgctggaccagctacacaactcactgaggatcgacctctctacatacagggtgagtgaagacacggctgtgggcaggataatagatatyaagcacggtcccagagagactgtaggccaatcttggctataaagattgaggycagggaaaactggtctgtgtcatcacatccacccaaatggccaatgctactgacacctgtggttcttttaactccagggaccatgtggtgtataaatagcagcaggtatggttagtttttatagacagttgtctttccaacctcattcttaacactctactaaactctctggtgacattctcattagggagtttcctgaggataatctcttccaggagtatccttttaaaaaattagatacctaattacatttcttttttgcatttttccatactctcctcgttttccagcggaggtgtgagaatctggctaggggacagagagtagcttggcttttgcaagtaatctgtatcagagagcatgtccattcctagtataaagggaggaaataggtatagtaggaggatggttactgggacgggacaggataaggaaatgggcagtttcttagttcctcctatgttagatcttagaaatggcttcattacttgctttaaagtgtgtgaattttcagaacaggcaatatatgcacattaaaaagtaagtataaaaacaaccttaaagtcaaaaagaaatgaggttttaattgtctgcactcaagtgccctccatttgcacaaataatggacagctgactgtatatcttatatttggcatataagtagccatttgaaggtttaaaaactgaccattaatgtgaagacaggctcagcatctcccttcagctcttcatagcagctccctcctaagactcgtgccaaagtgaatgaagtaaggatggctggaaattcctaaggaactcactccaaaagcagttctgctcagagatctgccatctgctggctgcagaacagtagaagagctgggttctattgtacaaaaagtacaggtcctggacctcagtttggtctgtagtgtggctccacttatattccaggatatacagttagattgtaaytttcgaagaactcactgttggtgtgtaagaatcttcatccaagaaaaaagcatgtgtgtaagtttgtgtgtgcctgtgtgttcctttgtacaagtgcttatacattgcatgggaagtagggctggaggaggatgtgtcactttctagggtggggagtattaacccctgcttttggcaagagcctgtttgcatcaatagaaaaaagagaaggagacctgtaactttacagtgttttyggccagctcaactagagaaaaacccagtaggtaacaattagggaagcttttgatatcatcacttttggcagggaaggttttcatagtcctctgttcctttcttacatttgcttgatttgcaacagaataatttccctgctgggagtcctgaacggcttcaggacttaaaatccacagtggatttgctgaccagcattactttcttcagaatgaaggtaagaaatggactggggcttgggtggtgctgggctggagacctggctacargaacgtgaagaatgagaatcaytgggcagagtctgaggctacaggattcatcacctctaagcttacatttctgtgtacctgttccctgggttacttctgagagagcacatagactatggatccatgaggatggggtggaagttttccctgtcaactatcctggcaatttcatcacagggaaaagtctagggacccagacagggatgaaagaatctagagtaggtttggggtagtgctaggagaatatcccacccaggtgagmaggtccttgggcccatatttcttcttttaattggcaggtacaagaactgcaaagccctccaagagccagccaggtggtaaaggattgtgtgaaggcctgtttgaactccacatatgaatatatcttcaacaactgccacgacttatacagccgccagtaccagctggtaagaggttcaggatcaggtggggccagctgtcagtggctctttggagcctcagttttccttcatgatggtggtggaaaagcactcaggacaaagtacttgatgttctcaagggtgagtgagttgtggagtatgaaccatgtggaccatgtgagatatgtggatggaaagagacccctgggcaagatgagacatacctgaattgaacagaaatggcaacaataatgatgttgaagaaagtaaacctaaattcatgcacagttcaggggttgagtaggggaattctcagtccatcccagagtctttttttctccctcaagtttaactttattctgactcttgcagactcttgtaagttctgggcttccttcctctgagatctgaagtggtctctgagctgctggctcctggaagctttacttttccctctaattacttctctctgaaatgtgtggttcttctgggttgtattcatccactggctatcaagactgaccctatccttctgtgaggctgagctacttcacctgttttagcctggcaccctaagtcagtacctggtgacttagtacattttcccagatccttctaatagtgtccccgatccatgctcccaacttatttgaaagccagaacttacttctagctccaattactcaattacagttccaatcttaggagtttcttgctgaccatacatttgcagagtggattcccttcagtccaacaaatattgaatgtttgttctaggccaggtctgaggagagcacagtgctccttcagtaagtttgcagtctcataaacatatatataactctaatcaaaagagtctgtttgaagggccttgaaaaagggataagattaaaggaattccarggaggaagagtcttttcgcactcttgatcagataccaggaaaagctacataaaacaaggaacatttgagatagaccttaaaaggcagtgggatttggacaaccaatgatggcaggacaacctaaatgtcttggacatttatctttaagtaactacatccaatttgtaaagcttcctaggaacaccctcataaagactaagatcttgttcctactgcctcttctcattcccaagtgtactttctgtgccagccatgtatttaaggcttcttccttttaaggtttctaaagcctcctgttgattctgaaatccatgggaggttttcctgaggcctttgttttacttgatacattctaggctcctctgtcatctgtctatgaagtctctggttgaggaaagacactgttctcataaactattcagggatactctttagcctttgtattttagtatctgctttttactttctctcaatttcattttttccttattccatatttacactggcataaactcttgatgtcttttaaaatttccatctgttgaccttcagtcattggtttattcgtccattcatttacttaacagagcattagagacataaagttgagtaagagacatttcagcctttggggatctcatggtttagtggaggtcagggcaaattactacatttattgtttttttgttgttgttattttgttgttactatgttttattgtagttgtagttttctgatacatctacaccaaaggttcacagagggtgctgtgggagcccagaccaaggatgtcaggaaaatctctcagaagaggcaaagttcaatctgaattttgaggaaggagtaggaattaactaaagaaaggggctggagggaaggggcataccacagagagaatagaatgcttggaggcacagaattatgtatgagcttgttaatttaaagaaatataagcaggccgggcgcaatggctcaagcctgtaatcctaacactttgggaagccggggcgggtggatcacttgaggtcaggagtttgaaactagcctggccaatatggtgaaaccctgtctctactaaaaatacaaaaattaggcaggcatgatggtgggtgcttggaatcccagctacttgggaagttgaggcaggagaattgcttgaacccaggaggcagaggttgcagtgagctgagatcgtgctgctgcactccagcctgggcgacagagtgagactccgtctcaaaaaaaaagacaaaataaaaataagataaagaagtatagcaatttagggtacttacggcatccagctgtgggattcagctatctgggatcaaatcttagttctgctctttaaaactgcatgactttggacaagtcatgtaaccttgctgcccttcactctcctcatctgtaaatgaaggtgataataatttctactaaatggagttgttgtgaggattagataggataatgtgtgtaaaggtcttagcagagtgtgcggcacataataagcagtaaataagtggtggtggtgtggtaatagctggaacaaaaagagttgtaaggtatgaggttgagagtcatattctggaaggtgtaaactaaggaatttaaactgtattgaacgccgttgaagggctttaagcagaggagtaacacattgagattttctttgtagaaagatcacgatagctgcaaggaggagggattggattgaagatcaaagaccagttcagaaatccttgaatgataagagcctgagccaggacagtgacagaaaaataaaaggaagagatgtatttaagttatattaaagattctgtcctggtttctaggaacttcttgataatgcaggcttattaaggactgtggaagctttccagtgacatatgacatcccacataaaggccctgttcctgtccttctgggcagctccaccttcacctttgacttagtgggagataatgtgtgttccaccctccctgtggtgactcctacttcacttttctgggctgtgaatatagagtgatttctctttacctgaaagtcaccattgtattcccttgcctcttcccaagtaaggccctatcttatctagttaggcagatagcttcctagatgcagttcttccccctaataacttcaggggatcaagggaagtcctactccactgaaaggctgaaatgcgcaccagatctgttcagtagctcctgcagaagttgaaagagcttctcagagctgagatgtgtatgtgtgtggtcgtggtgtgctgtcagtagaggaataccaccagaagaggagggctgcctgcctgtaggggccgcatagaagtagacctatttagtaaggctggaggggctgtttcctttagccagcgagttactctgcccatagcaactgagagaaggaaggaggatgggcatccttatgtctcttggactgaccaagtttatcagagagaacttctcagcgataggctccctgtgttcagggatctcacaatagtcactcttacagaacagggatagtcttgtggaagacaggctctaggagaggaaaggtccttgattctagaggaagaggtataggaaggggaagagaaagaggatcgttggagacaccctctacattctactctgactctttctccctctctctcactgtgtcctctggatcaagaagcaggagctacctccagaggaacaagggcccagcattcggaacctggatttctggcccaagctcatcacactcatcgtgtcaatcatagaggaagataagaattcctacacacctgttctgaaccagtgagtatcaccctctttggccctgtctgttggtggttggtctgtccatctgtctaacaacctctttctttcctgtctctgtatgtttgcagtgccacctcttcttcctgtccatccatctgtccctctgtcccttgtatctgtctgggtaactgtttctggagacaggtgtggaaacataatgggggtccctggccagattgagccagcttccctggagtgagagacttctgggactgggactgccataggagccccaggggatccagagaccatgtgtgtatgtgtctgtccactgtgaatgaagtgggccttcttatagcccacccccacttgccctttctcctccagcttatttagcctgcgcctgctttccagcctctgcctggagagtctctacctctcaattccctgccttctgggcatcttctgcccccaggcccatcttgcctatggggatcccttctgccctcacttgtcctgccactggcccctggcccctgggccccttttctccagattggacctagccctgttccctaagcatctcctctctccaatatgacttccaagaactaggcactttagccttgaaatgaatcaaatcaaatggctcttgccttattctctgactgtggtttcttctgtcatccaggtttcctcaggagttgaatgtgggaaaagtcagcgcagaagtgatgtggcatttgtttgcccaagacatgaaatatgcattggagggtaaggatctgttcaaatcagtgggctgccaggctcctagcccaagctcctcgttcactgtccctttcctcttctagacaactacaagttctgggtgagtggtatagtgagaaactaaaggaattctaggcctagtgggatgtaggccccgggagaccttgggtgggcaaagttgcagccaaaggacatatgaaaatggctgtgtggatgtagcttcctccttccagctttggagcaactgcctgttcaagaccttcccagcccagagatgaaattctcccatggtgggtgttcttaggtggcccacttcctggagaatggtcttgggaaacttcagttttaaagaatcagagaaccttaaatacacagatagatgtaattgttttcttatgttggggactctctggcctggcttttcttgcaagctgctctggattagtatgacaatgccaggaagatacttcttccctcacttctcctatagagcagggccacaggcaaattattattcatcttactcattcagcttgttcttttattcatttcctaccttggtccacaaagatatcattccatacctgtattagaccttcctatctgtacccatctgtactcacctatttagcagcgtttcctgccattttatgtgtggtagtctctctactcagtctgtgaaagcccatctaggaggaggaggagccatctgggcaaggacaaagcagagtctggatctgttatttgggtgggatggcagggcagatgagccaccctcagatgcttgaatgtgtgaggtttagaatcagtgagtcttgagattgaaagaaaccttgaagatctgtgttacatttgagccagccacagactacacgcatacattctgtaacacaagcccagagcagggctgcctgctgtcaggccagggaggaggtcattggtctctccctccagatgccacttagtgagcctgatggggagtacagtctcagttcttgaagaactctggctccagtgggtttgggggaaaagagaaaacacctgtgaaaagtgaatcaactccacaagagaagtagtgtgaggtggggcagaggttttcaaacagaagtatcttaggagctaagttgaaggggaaacccagaggctaggctccaggcctcttgcatgatgacagctcagccagccctgcatttatcaatcttacatggaattctagctgagatttcttttgaaaggggagttctgctaatgtttaaaacaaacacaaaaggattgaaaacttctactttaagagaaagaattaatgttggcctgatttcatacctcaatttcaccgcctatgtagcactgtgaatttggtccaaactacttaatttttatgagctcccattttctcatctgtaaaatgggagtgatgatagcatctgtttctttgaactgatgaagtactgagatgtatttagcatactgcctggcacttactcagcactgactaaatcttagttcttaagaacaataagaaaccattgcaggctcttgagcagagatgcaatgtgaagccagcagtattttaataagatctacctcagtgggagatgagggcagctagaatagggagagactagaatcagagaacgcagataatgaagagctgttgtaataatttagggatagagggtgctgggattagagaagggaagtggagagaggagaatgggctttgatagacattggaaggaagccagaacaggacttcgtgattgtcagaatatggagggcaagagaaggggaggagttttgggggcctggatgataggagagtggcattgactctgactaaaccaaacaccgcatattctcactcataggtgggaattgagcaatgagaacacatggacacaggaaggggaacatcacactctggggactgtggtggggtagggggaggggggagggatagcattgggagatatacctaatgctagatgacaagttagtgggtgcagtgcaccagcatggcacatgtatacatatgtaactaacctgcacattgtgcacatgtaccctaaaacttaaagtataataaaaaataaaataaaataaagaaaagggtgaaacattaaaaaaaagaaaagaaaagaaaatgctgtccgtcaccaaatattttgtaagtcaacattattaaggtatcatttatagacaatacaataagaccactttaagaatacaatttaatgagttttgacaaataagcccaactgtgtaacaactctcccaattaaaatatgaaacaaaagttccttcttgccactttgcagtaaatccccactccattcaccaaatgtttattgaatattttctctgtgcctggctctgtgctggttattggaacccaatgagatgaacaaggcatagcaccatcccttaagaaactcacagagcagtctagaaaacagtcgtataaattggtagttacaacacaaagttataatgccacaagaggagtaagtatagggtgctgagagcacacaggagaaccatgtaacccagattctgaggacctgggaaggcttcctggaggaggtgatgtacaagccgaaacctgaagggtaataagatttagccaggagggtggtagtgacaagaaagggagacacagaacatttcaagcagaggctacagcatgtccaagacctggggtctagagagagctggcatgcttggagaactggaagcagcagttcagtgtgactagcacttcagagggtaggggaagagataagtaagacctgaagatggagaggtgtgacggagtcagatcgtgaaggaggttgtaagccatgcataggcttttggactctctctctttttttttttttttttttttgagtctctctgtgtcacccaggctggagtgcagtgggctgattttggctcactgcaacctccgcctcctggattcaagcgattctcatgcctcagccacccgagtagctgggattacaagcgtgtgccaccacacccagctaatttttgtatttttagtagagacggggtttcaccatgttggccagtctggtcttgaaccctagcctcaagtgatccacccccctcagcctcccaaagtgctgggattacaggtgtgagccaatgcatccagctgacttttggactctatcttgaggtagctgggagccactgacatatgtcaagcaagggattgacatgatcagattattatgtagaaaggccagtcgctctgtctacagtgtggagagtggattgggaggcagaatgaccagtctggaggctattatagtaatccaggttacagatgggggtaatgagacctaggcaggtaatagcgtggctagaaggaatggatagattccagagacatttggaggtgaaatcaggggctggcgatttaactgggtatgaataaagaggtagaaagaagatttgaggatgatgctcagcattgaacaagagggtaagattagttggtgtactctgttccacttcagctggagattttaagatagtgagagacaggggcaagttaaatctaggcatgatgaaatgttccatccgaagcttatataggccaggcrtgggggctcacgcctgtaatcccagcactttatgggcctgaggcgggtggatcacctgagttcaggagttcatgaccagcctggccaacatggtgaaaccccaactctactaaaaatacaaacattagccaggtgtgctggcacatgtctgtaatcccagctactcaggagcctgaggcaggagaattgcttgaacccaggaggcagaggttgcagtgagcagagatagcaccactgcactccaccctgggtgacagagcgagactccatctcaaaaaaaataagaagtttatatagacgttaccagaaccaaagagagattagggggagataccagcaaactgggtagttgaaatcatgaggttggaagagctctccaggaggaaaggagggagttaggtggaagtcaggggcaggaggttatggattggcctttctgacagattaccccacctcaaacaactttactggagcatgactccatgggacttgttagaatagtttaaagtgtgaccggtgtttcagaacttgtcagttagtttttataccagagaagttaatacagaaattagggataggggccagagtgcagataataaattgacagagaaagtgaaaattatatgtagaaacagtaacttgaaggtccctaaaagaaagagttagggagttatggagtgatgggcagtcctgcttgaaaaggaaggaggagggccctcctgatgtttctaggttcttagactggttccagaacagcaggggatgggggtggaggagaggggctctcttttgatgtccctgagggtctctctgatgtccctgattttttcactctctttgttgctcattggtgtctgctctgtcacaagcaaccactgtcattcatatacgaaaagtcctctttctgggtggtaagaacatttagttgtccttttgcctctagtcttacaccttttycctcttctcctgctcactgcttcatagaagagactgcaaatgcaactttaggttgagacagtgctgcctgcagtgccagggaatgaaattcctgggacttgaagccctttgaggcagaatcccgggcttccatttcctccttcagtgtctgctacactagttcacaagggccagctgccccagcctggatgttccgccttgacttggaggagcatcacccatggcaactcaaagttgagcaacaaagtccccaaggacagtggccttctcttctctgctgcttagtcctctcccacatttgcttgcttttaccattatgttgatgtgtcagcatacaattgatttttattattcaaattagtgcttcaactatgaagcgggtagatgaagagaacctatgggtgtggccagtgctccagactctgagcaaattgtgagttatctttgtcttagattttccagaaggctctggagattcagcaagatgacttttcaaattcgtagtaagtgccccattttctgcagcatgatatgtcctttcatctggctgtgtttccatagtttccaaactgactattcatatttgcatacttccctgagaattcattttttcaatgtctcagctctgccctggagcccttcagtttgcctcaagattccattacaccatggctgcccaactgctctgtcaacttgggcccagtttgattttccctgtctctgtagttgtcactgacccattcatgccatgtacacctgctcatctctgcctttaagcctgtctgaaggatgactcagctactgtgatcagaaaggccctggaaaaccattgtcctctacagtcatgggcagtctccctactaatcagcatcagcacccatggccctttctcctcttctacaccagaggccagatgctagaacaaaaagaccacttccaaacgctagagcaaaaagactgcaggctttatctgggagtctggcttagtctttctagaggaagatttgggccaagcttgtggagagttgctgagcagaacactgttggggagagatggctgtgagaaggaggttgggagtcacccttgtcctaagacatctgatggagctgcctgaccagatctgctgccttgggaaggctcaggaaccatggcctctactgctgggacctgacccaacctttctccctaccactagagcatgagaaagaccacctgtgtaaaagtgctgactacatgaacctgcacttcaaggtgaagtggctccacaatgaatacgtgcgggatctgcctgtcctccaggggcaggtgcctgagtacccagcgtgagtcatcatgtgggcactacagagggaagggagccctctgggtgggcagggctagtatccccaattcatttcagcaagccagtctcggggactgcctgttcaggtaccaccgtagacaaagaaaagtgttaaactgtgccctgccatcccgaggaccccagtctggtggagctgtcaggaagtggcgtattcccaccgctagttctaagcccctgttctcctgctgtggctgcaggtggtttgagcagttcgtgctacaatggctggatgagaatgaggatgtatccctggaattcctgcgtggggccctggaacgagataagaaggatggagtaagtcaggggctttggctgcaccgggttcaggccaggtctcccagcaattagctattggcagaagttcctgggctttggccaggatggctatgcctgccctgtggagttcacaggagggctgttgagggccattagccactcttgctggtcagagccttttcaaactctacaagcttgggaaaagatagcagctgtggatggtgaccctgtgtgtggtcttccttagttscagcagacatcagagcatgcactcttttcctgctctgtggtggatgtcttcacacaactcaatcagagctttgagatcatccggaagctggaatgcccagaccccagcatccttgcccactacatgaggaggtttgctaaggtgaccataactcttcctactccctcccccttaccaccaccacactcacagtctcatcacaggcctgagctcagcacctctccactgtggcctcctggtaaagctcgtgtgacccccattctcctttgctggtttctggggcagacagatggttctgtcttagtgctgttctgtggttgagagagagctttctcctgtactgtgggattccccctttacctccctgttgttattgttctgtgatgagaagtgccacctcaggcaagatccccatagaagagctaagagttccctttccttttctttcctttctcctcttctcagaccatcgggaaggtgctgatgcagtatgcagacatcttgtcaaaggacttcccagcctattgcacaaaggagaaactggtaggttcaggccctgggactcttacagaaagagagtggaagacatttgaatccttgcttttgaagctgtcctcagaattgagggttggggtgacactcctgwwgcctgattcccaccatggctttgcttcagatccatgccacaaaattacgagaacttgacagagttcctgtgagtctcatttggtacattatcctctgctaagctagacctttgcttagtcttttttttaatatatatataaaaactttagatattcagaaagttataaaggataatacattaatacttgagtacctaccacccagcttaaaaatgaaaacatttgcttttagtcaaggagaattatctgaactggccccagctcttagtgctgagggagaaacctatgtcatatgtgaagtccctgtggcttttgtgagagagggagggaacctaggctaatgggtcctatgctgaaagragccaagactcaacagctacatctgtccccaaagccctgcatcctgatgaacaacgtgcagcaactgagggtccagctggagaaaatgtttgaggccatgggaggcaaggaggtaggtcttagggtttgggagtcactgtattttccctttattcctgagctccttggccatagaactccaccctctcttaactaggtgtaggccaggaatttagcttggggtctgggctggyttaatctgaggtaggcattcgggtaaggccctgcgagggaggaataggcactggggtaagccctgcaaggaagtagtaggggtgtggcagggtagaagagggtaagaaaagcagcctagccaggcttacctcctgtgaatacagctggaccttgaagctgcagacagtctgaaggagctgcaggtgaaactgaatacggttctggatgagctcagcatggtgtttggaaacaggtcagtgaccccacaatacaaggccctcagagccagatgtggtccctagccaatcccagagcccttgccccacacctctccatatagctgcaggtgtgtggatcttccctgtactcctgctgactgtccctgctggaaatgcaccatgagcatatgggaatgggaccaaatagctggtgccgctccagggacagtgtgtgtttggggagggaaaggctacactgcgggcacatgtgtagtttccaggtacggattgatgaktgtgttcgacaaatggccgacatcctgggccaggttcggggcacagggaatgcatctccagacgccagggcctcagcggctcaggatgcagatagcgtactccggcctctcatggacttcctggatggcaagtgagtacagcattcaggactatcctgtggggatgagcaaagcagatgctatcgggcaagggagccccttggggagaggggttctcaaactctcaccctggtctcacctgttgcctggacttgcagcctcaccctctttgccactgtgtgtgagaagacggttctgaagcgtgtactgaaggagctctggcgcgtggtgatgaacacaatggagaggatgattgttctgcccccactcactgaccagacggtaaggacacctccttccacttcctcctgctgtctcccttcccctcactccctgcttcctgatggagttggggtcctctgcttttgactgattccctctctgcccagggcacccagctgatcttcactgctgccaaggagctgagccatctttccaaactcaaggtactctgggtgtggggtcctcctggcaggtgtggtccttctgaagtcatggagagagggtggctgcggggaaggaaattggagctttggagactgaagaggaaaaggaggagatgaatatgcactgggggctggcaggtgggtgcaagactttcatgactgctgtgagctgtcctgatgctgctgatttctctgaacaggatcacatggtacgagaggaaacacggaatctcactccaaagcagtgtgcagtccttgacctcgccctggacaccatcaaggtggaggccccccctttttcagacagtcttaaccaccacactcacttggccctggcattccactctcccagaccaggtgtccctccaattcttaacactccacatccagaagagagttactatgtactgccaaggatacagaatcagatatggttcctaaattcaagatgcttatcattggtaaggtgatataaggcaggaacatatgaactgtgcttcaaggcacctgggagaggtatgtcataggtctcaagttctctaaggttcagatgggtaaaagagcacttttggttcttctccgtgcctgaagtgtttctattccatttctgtgcctgtccagaaagacccatccttcaaacactgccgtacctccaggaatgtggccatcccctactaatcctgccaaatacccaaataatactcatccaagagcctatgctctggttctgtgggtgttcctgaacagcctattctcacagtcctcttcttgcttctctgaggacaatgttggggagctgctttctgtaaggggatgaagcagtcacrggtgctcttttatcttgcagcaatacttccatgcaggaggcaatgggctgaagaaaaccttcctggagaagagcccagatctgcagtctctacgctatgccctgtctctgtacacacagactactgacactctcatcaagacctttgtgcgctcgcagaccacccaaggtaaggccctgagggctttgggtatccacctctcctctctgatacacatcttcccctagggagtctgtatcttcatgcccttgggagcagatccagttacttcttcagagagcccttcaaattcagatctctattgcttgatgggacctcagtacttacctccaccccatacccattaccaggcaggagaatcacagaggcctgggaaatatgtctaagatttcttttcccagacattgcctggcccatgcatgtttattaaactcaaggaatataccctgactggtaagcggcaagaatgaaaaatctgtgaggaagccttgagaatgaatggaagccatgagaaatgtgaaggctcatagtgtgtggagctttgctgggagttgttctggggagagaaggcaaaagactttccagactctgcagcatggatagggagacaaggaagagaggcaaaccatggcagctgctgaagggagggtgtggatcctggggccctgtgcacagctgaggctccagtctcaggggtgctgtttatgcacaggggacccaggaagccggttttctcccagtgactttcagtcctcagaacccctccctacctccagcatggcctgtccaaaacaaaacacatctgcatagatgtagctcaggttgaaattctgacgctggagcagagccctcccaggaggcacctcaggcacatttgttactgcttgttccaaggaaacctgagcaggctgcctgggggagtgaacctggtgggggaagttggcgcttaggcattactgagctgtgtgtgaatctggggcacagggctgacctagaggggagagggctctaagcaggtagactggtgatggaaagtaagaaaatggaagggaccgaaagtactgctctattccccatctgttctcatttccaatccagggagggaagaatagagagcaaaagaagagctgtgagtctcacttaagtggacaggtagaacttttacagagctgggtacatgttcaggcatacaccatcaaggaagatctgagttaatccagaaaggctttttagaagcattgagctttaagcttgataaaagatgaggagagcctggaatgagcacacatatgatgagagcagggttggcaactgcgggaagaatccatgtgtatgcgtgtgcattttctacccgttgctttatcatttaagggtctaggaaattaaagcctacagcctgtctcttgtcctgcttgtctcagatacctcctctctgtatttttctactgtttctgcccatgatttggttggtctctgacccatgaagtctaatttggagcattcacacactgactgcagctctttcacttctttctccactctgccccacctctgtgctccctcagaatatgtgtagagctgctttgaatggctgttaactccttagactgctaacggattcttctttctctgttctgctgctgctactacctctgacttgcctgtcctcattcagtgcatgatgggaaaggtattagatttactgctaatgaggacattcgtccggaaaagggtatgttgtacacygtgcagatatggatctaacatgggctaacactgacccctgggagctagaatgagcaactcgtgctgggggtgggggaacaagctgtcaaggtttaggagctctatctcaagtcttagagatgggtaatgccttcatatagcccaggaaggggttctgttgttgatctctgtcgtattctcagcattctcccacccctccacctcaggacaaagaaggattttctctggggtgtaagattgtggtggtgttttctttttttctttttttttttttttttgagacggagtctcgctctgtcgcccaggctggagtccagtggagcgatctctgcccactgcaagctccgcctcccaggttcacaccattgttctgcctcagcctccctagtagctgggactacaggcgcctgccaccactgccagctaatttttttgtatttttagtagagacggggtttcaccatgttagccaggatggtctcaatctcctgacctcgtgatccccccacctcagcctcccaaagtcctgggattacaggtgtgagccactgcacctggccaggtgttttcttaaaatagggtggggtctctgctaaggggagcctgtagattggctcttttcagagattggaactggggagttcattctatagaggggcccaggtttgagggggatgaagtatttcagagcacagcagcctcccaagcagggacctctaggaatcctgggcataggtgggaggttgctgcttttggctagagaggacccacatttttccattaagagacactaccaggtcaacataattcccagacacagatacaaggtgatggcactgccctaccccaacgtctttcagttaaaagtccttcagcctaggagataagagttttggggatccttgagagagagtcttagtgcacttttggaaaatgttgcgcctaagatgctgtcagcttaacttgtgttacaagacacagccttgttctttatcccatttctttcccttctcctattgcttacttcccatggttactgtggtgattgcttcttgcttttgggtatagggtggtgacctcctcacccctcaggtttacctcctacagttctccaatggggaatcatctctccatttgtccctcagggtctggtgtggacgatcctgtgggagaagtctctattcaggtggacttgtttacacaccctggtactggggagcacaaggtcacagtgaaaggtgagtgatggacttacaggtctgccctttccttgcccagtggcctcactcatcactcaaaagcaggggctgctcatcccagccctccagctcagccctcctccamggggaaggtcacctggggttcaagaactgggaaatcctggtgggatccctcacaggtttcccttgtttgggcagtggtggctgccaatgacctcaagtggcagacagcgggtatgttccggcctttcgtggaggtgactatggttggcccacaccaaagtgataagaagaggaagttcacaaccaaatccaaaagcaacaactgggcccccaagtacaatgagacattccacttgtaagttacgggggggacatacaggactctgggatgggggtaagacttgaggggtggggggagaggagggcccggggggatggcagactggggtgaaatcagctgaagactcaactctggcctcataacttctatcttgtgctcacagcctcctgggaaatgaggaggggcccgagtcctatgagttgcagatatgcgtgaaggattactgctttgcccgggaagatcgcgtgctagggctggctgtgatgcctctgagggatgtcacagccaagggcagctgtgcctgctggtgccccttgggccggaagatccatatggatgagacaggcctgaccattctccggattttatctcagaggagcaatgacgaggtggcccgagaatttgtgaaactcaaatcagagtctcgttccacggaggaggggagctgaacaccttcgactcctgtgccaatcaggcagcagcaatttcacaaatcagggccagtgggagttagctgtgtaaccggcttagggtctttgcagtcaagaggctgaccccttcagttaaagatatttaaggaaaaatttggggtggtgataatatggcttttcacagaaagggtcatgaagccctggcccaacaggactgtggtactaggggctgggatgtggggttaccacatggagagattttccattaagagagaaggacaaacatttctgagagtgtcagccattcttggtagacacctctccactcctcatcccacctctacccatctccatgccacaccttatccagttagacacatacataccaatcattagaagaacaagtttagaaggtgtggaacttgtgcctggctggctgggtagtcagctgagcctgttgctgagcccrgtggtctggattggagtatggccagggcaggagtacacagaatagaatttagactgtcccttgagtagaatccactgattttctgtggctccagtgagaacaaggctttgaaactgaacaagataacttctagaaatgaactgtactaatccctttccccagattgtatcatgagtagaatcaggttcacgtggtgcttcaaagccctgagaagaatatttctttggaccccaggcactaggggccacctgcctgggagtctccctgcctcactcctctaggcaggggagtgatgcttcaggacgtgacaggctgttctaacatgtgtctacctgagggctagttgaaggatccaggartattttcttcttgrgtgggccctgaacaaagccaaaaattgtagaaaccagtctagaaaaagtcctgctcatctgtggccactgccttctagccgtcctccaccttgcagaaagaatctagcctttggtctctctctctctcatcggggtcatttgctattcccctctgatattcaaccmtatagaaggagcctggactctgatccctctgtacaggctggatggaaggggccctccacacttcctgggaggtcagagacaaactgtttcagagagtcagatggacttcccaagacttgttgagagatgtgacatggttcttggatttcctctgtagcagcctcctggacttcctgaggactcgacattgtccacagatgtactggccattacatgaaacaagaaaccaagcatctttgctgttgttaattattatatgtgccattgttacaggagattataggctagtctgtaataaattatcttatagcagcctttggggtttggtaattctgctaatgtgtggaaagccatggaaatgactgtcctttataatggtagattttggcctaatggtcctttgctgcttcacactcctccacccccatacctgacagccagtgggtgaagcctaaagtggttctggataaacaccactgggctaacatcctgtcctagacctgagaccaccaatctaattaacagagtcatgggacctacggcaccagcttcctacaaaaggtccaaaagagtagcaggagaggtattctggtgaaaactagtccatgcttctcttccctttgtctagaatcactaggacagatcacagcctgggttgtgaggacaaggcaggggcccactggggagaggtgtgcctgcccgtcttggcagaggactgaggctgccacagacaggacagaagattaggcttaggactgtaccttggactttcattcaggctctattcgaggaagaagagctgcagtagaaagcccactcccaaaggggaagaaataaggtaaaaggcctcatggcgtggaaatgggaaaagctgaaacaagaaagagagtgctcacctactctcaacctgcactaacactacttgtggggcagggactaatggggcaccagacagggaactagctccgtttccactgcttgctaaataaatccttagagttcagttgctcatttaaaaacttcctcctccccgctcctctcccaagccagccacttaacatttctgcctcaaaattacctcttgaatccattgggtcgcctcaagttcccaccaccacaagagtcgtggcagcttttaggtcctcatgcctgagttactgtgataatcccctgcttccgttcttaccctgctctcttcacgcactccaatataaagtccttctcctattaaactattcagtggtcacccatagcctccaggctgaaactccaagaccctccaagatagcgcagccggcaccgccccccttgcccctatcctgcagctgttctaaagtactgccccggcaggtccccgacaagcactgtgtgctcctacccctccgtgcctgcacatgctgctccccttgctggaaaatctgccagccttttccactgctttctaggctctgctatctggacgcctccccacagcactctacattgttataatttacttgtctctttcccctcatcagcctgtgatctacccaaaggcaggatctgagtgttgtatctccatttccccagcggccagcatagttcgggtacttcaaagccagatcggcccctaggggccctctccatggagaaacggtgggtctggcacctgagggtaggggtgtggccagaggcgggctcatgggagatgggcgtggtttgtgggcggggctctgctctacgccggaacctgggtctctagggcgtctgcgcaggaaggtgcgttgagatggcagttgccggagttggaggccgggcggcgacggtgagcaagaggctcccaaagtgggtgcccgagtagaagttatcgccttctccctcccaatattccttgaagagagactgtcccctctcagtatttccagtagctgtctatccttatactttcttgagacaactccccatattcgagtatactggttttccagacactcccacagaggacatatttgtcgagattatctaaggaaggggagctttatcccccatgtaactcctaaagggcacacatttttccagttatttcatgaagagatacccccaaagctccagcaattgcacattcttgttaactcagggagttttccacttttccagcactgtgcagattctcgaagaagtcataatccttgtcccatacttgatctgaagtggcacgtttgctatcattccctcccactctttggcataggatacctactctagagggaagaatcaaactctggctggctacccatggcttcagcaagctttcagatttgaattagccgctaatttctgtaggctatatctaatcagaattagaacagaagtacctttaacaatggacttttaagaaagaaaaatcacatctttcagcgtaagttgtcgctgtcgtattcattgtgaatattcggactaactccctgaatgatcctcccaagcccagaagcagacaggcaaagttgaagaagcaacaaatagtggagatggtattgaagtaggagtcagaagattgggcccagttctgctacattctagtcaggagatgacctttaacttctcagagcctcaataacttgaatctgttatctaggactaataactcctgccatgtctacctcagagggatcaaatgggctcatatatatgaaagcactttgaaaactatacattttctctaagtgtataggggattattataaatgatcctctgagttctaattaacttccaaggaatttgtcttgcttggtactaggttcaaatgcaacagatattttttgagcgcttactatgtgccaggtattcatctagacatgaggcctagcattgaaccaaaagagacaaaaaccccttataaatttaagaatgagtcgtcagcatattaagtgcctactcattacccagtgcagcgtcaaagcatggtgaagtagtaggaagaatctgtattctagatttaactctgccactatatagctgtgtgagaaagattttttccctgtgtgagcctgaacttcctcatctgtaaaataaggaagttaagcaaggtaacctctagttttctagtcttgactcatctgtactttaggggacctgaaagaaattgattaaaatacatatactttattggccttttctgagttgggttaagaatggagagaaaaataggaagcaaagaaggatatgtctgtatagcaaatcgtggggtttgataaagtataatttttccaagtattaaaaaatttgacttttatataaatacgaaattaataggtctccaatattttatttattaattaatgagggaaccagtaagatattaagatcagttcaaatgaaaaattaagagctaaatatttataggcaatttaataaaggaatgttaaaatacgatttctgaatgatatacaaaactaattaaggtcctaaagtgcaataagtcataaattttggagtcatcttttccaccagacataaaacatttttatcactactagatgaaaatctataagttaacctctgccctaacgagttataaaatagtccagtcaatagaaaactaatcaaagatataaacacaaaactgtactaaaagatcatccaataatttatttcacctgtttctaggtttcagatgacttttctgacaattgtagtcatcaacttcaacttagttgtcaggaaatgaaatctgtttcccaagctttgaaactataactttatgatgaagataaataaagtgaattccaaactaccatatgtgtcttagagatagatcattttggacttcagggatcaagttccaagtttcttaagaatgtgtttgaatgacacagtatcagcatgagaaattctcatattctgaatctttatttcctttatagaaattccatggaattatagttggtctactctgcaatgtctctatttaaaagcccaagtgaggacagacaagatgaacgtaggtaaactcaggaaaatgtatctgagtatgtcattattattacctctgaagtgtgtgtgtgtgtgtgtgtgtgtgtgtgtatacatgcacatatggcagatcaacctggcaatcagattgttaacctaccaaacaactgatcaggaaaggaaatatatttttcaaaagtaaatactttgtacttagaagtacaagctccactgttttatcatctgaaaatcctaatttgagtactctcttaacttttatatttggaaattcaccagtaaagcttgtgtacctttccttctctccccattcttcataactgcctcctgctaaaaagaggtgatcagtgtgaaaaaaggctgctgaggcagataaggtcctcctttgcagcctttttgtggacagaacaaatggatctgtctctgtagtaagggaggatttccataccatttctgtgctttcctttggtgaatcaagattctaaagggaggccgggcgtggtggctcacacctgtaatcccagcactgtgagagtccaaggccggcagatcacttgaggccaggagttcaagactagcttggccaacatggcaaaacctgtctctactaaaaataaaataaataaataaataaataaataaataaataaataaataaataaattagccaggcatggtgacacatgcctatagtcccagctacttgggaggttgagggacaagaatcgcgtgagcctgggaggtggtggttgcagtgagccaagattgtgctattgcagtccaacctgggtgacagagggaaactctatcttaaaaaaaaaaaaaatcctaaagggagcaggaataatcacactccagccatctttcagaatggaactgcctgttatgtaagaacaacaacaacaaattatttctaatgtgaaattttgaaaaaggaagatttagatttaggcttccttttgaggaatggagaaagtgcagaatgaaatcagttcactgattgaaggtcacagtgtactttctttctttttttttttttttagtaacacggagtctcgctccgttgcccaggctggagtgcagtggcgcgatctgggctcactgcaagctccgcttcgcaggttcacgccattctcctgcctcagcctcccaagtagctgggactacaggtgcccgccaccacacctggctaattttttgtatttttttttagtagagacggggttccactgcgttagccagtatgttctccagctgacctcgtgatccacccgccttggcctcccaaagtgctgggattataggcgagtatactttctttacttgctgtcattgggcagttgtccgatttcatcctggaggaagcccatgtcaaggacactggccctggttccagaagtagaaagtcaggaaacttccatccaaaggaaaaccagggagtcctctgctaccctcaggagagctaaagggctaaaggacccagaagataatcaactgctctgcatattcttatgaacagaaaatatggagagccagaatactttagggtgtggtaagttccaggcaaatgaaaaatgtaataatcatcaataaagactgatcaattcattcgacaaatatttattgattattaaataagtgcgagccactgtgctaggtatggcaatacaatggcaacaaaactagacagaatttctgctcttagcgagattatggtttagcgaggggaaacattaattaacagcatatttaatagcaccaataaatataaaatatctgccataaatgcagtgaaataaataccatatgggaagtatagtagtcaagagcatgaattctggagtcataccgtctaggtttgaatcctagctccaccacttaccacgttatcttgggcaaatctcttaatttctctgctacagttcctcctctgtaaaatggggataataataaaagtgctgccacataaggttgctgtaaggattaaattaggtaatatttataaagcatttaggacagtatctgccacatgataaacactggtaaatgtgtaaaaaataatcaaaataatctataagagcttgacactttcaatcagaaagataattaagaacttcatctataaatgtgtgttatttcaaaagccaaaccttttaccaaggaaaaagagttgaaaccagttttcctggtaaatccctacaggtaggctaggactacctattgcaggtagatttactgcttctgctattttgagcagtaagcaattaatactggtttacccaagattttggcctattccactgaatttacaaaacgacagtgctaaacccaatcatttggcaggtaacactattttgaatattcagaatcttcaggcctattctggttggaaaatctacagtacataaatactggccagttctaacatcttggttgtctaccctctcctttctattttcttttctttttc

SEQ ID NO: 6800 - DNA, 13472 bp, Homo sapiens
tgggaccagtggggcagggggcctgccctgaggctcccaaccatcctctcctctcactgcatactgctcctttccagggaaaattgagatcaaaattgtccgcccatgggctgaagggactgaagagggtgcacgttggctgactgatgaggacacgagaaacctcaaggagatcttcttcaatatcttggtaagaggcttctacccccgagtcctggcccccagccctcctggagtggaggtgcgggcttgccccagccacgccattgctgagcttccatttcctgatctgtaagacaaggctggggttccagtggctcagagtgctgccatgcaggaagagcccctcaggacatgggtgtcctcattccctgccttcccccagctgcctggcccaggacttccctgggctcaacggccagtagctccagcccacctctaccctctcccaccaggtgccgggagctgaagaggcccagaaggaacgccagcggcagaaagagctggagagcaattaccgccgggtgtggggctctccaggtggggagggcacaggggacctggacgaatttgacttctgagaccaacactacacttgacccttcacggaatccagactcttcctggactggcttgcctcctccccacctccccaccctggaacccctgagggccaaacagcagagtggagctgagctgtggacctctcgggcaactctgtgggtgtgggggccctgggtgaatgctgctgcccctgctggcagccaccttgagacctcaccgggcctgtgatatttgctctcctgaactctcactcaatcctcttcctctcctctgtggcttttcctgttattgtcccctaatgataggatattccctgctgcctacctggagattcagtaggatcttttgagtggaggtgggtagagagagcaaggagggcaggacacttagcaggcactgagcaagcaggcccccacctgcccttagtgatgtttggagtcgttttaccctcttctattgaattgccttgggatttccttctccctttccctgcccaccctgtcccctacaatttgtgcttctgagttgaggagccttcacctctgttgctgaggaaatggtagaatgctgcctatcacctccagcacaatcccagtgaaaaaggtgtgaagcacccaccatgttcttgaacaatcaggtttctaaataaacaactggaccatcaatccatcaaccttttttgtggggtgggggttccagcagggagaaggctcagtgttcttttcagatcatgctctgatcctgttctttgctccccattccccaggtactataaacgggggctggggtatgcaggaagagaccagggtagctaaacaaagcctggcctggcaaggattgaaagaaacacttgcaatgctgtcatcttccttttctcatctgtctgtttctgttccttcccttttgcaccaagtctttccctattgtttccccctttataccctgaaagccaaaatgcacaccatggagctccccccggcggggatcttccttctgctgtggtctctcccatatcatgctccagattccatttgtcatccacacccctacccacctgtcctttcaacattttccaaaaagacctccacctttgggcatgcgcagagagagggctgctgcccacacatgccagtttcttagtatgcccaagggtacatgggcctggtgtctccctttcttcttcactaccaagtgcaggcatgggtccccccacatgcctcctcccagtgcagaggactctgattttgtttgttttgtttcgagacaagagtctcactctgttgcccaggctggagtgcagtggcctgatctcagctcactgcaacttctgcctcccaggttcaagcaattctgcctcagcctcccagtgactggaattacaggcacacaccaccatgctctgctaattttgagtgcagaggactcaggtagagtcctctgctctggtctctgaggtgaacggcctttctgctgaaggctgcccccgggctcacaggataagaaaagggatagaggggccgggagcagtggctcacccctgtaatcccagtactttgggaggctgaggcgggcggatcacttgaggccaggagttcgagaccagcctggccaacatcgtgaaaccccatctctactaaaaatacaaaaaattagccgagtgtggtggcgcacgcccataatcccagctacacgggaggctgagcaggagaatcgcttgaacccgggaggcggaggttgtggtgagctgagatcacaccactgcactccaacctgggcgacagagtgagactgtctcaaataaagaaaaaaaaaaaaaaaaaaaaggatagagggcccagaactcccatgtgtctataaatggagagtgaaggattcaactgttgaaggaagctcttgctgaacgtggactagtgcttactgtgcatgctatgcttacgttgttttgttttgaagtgtaaataggtagactcagaaaaccctgcttcctctggtccatctgcgccccctgagggagggatgctccagctggacaagagcttagacactgccttgagggcagcagtagtcagaatgcagctcccagaccgcacccctcatctcccaccagcggacccttgaacaagtcacttaactttctaaatgctgtttcctcattggtaaattgtggacaacagtactggctttttaagatggttgcgaggattgaatgagatagagtgtatgtcgtgcttttagcacagaacctggccccaagtaagtgctcactagctttctattataagccaactcctgagttctgaaaagactgggttacttggaggcaagagtctcagaaggagtccccaaagctgatcagaagctcagaatgggaaggggctggggcaggagggctgtgctttgatttgctggggatggagtctcagcatcaccagaaagcagagttctggaaatctcactctgttaatcattttgtactttcaatcgaaattcctttttcctttcctttggcttttggcggcagcactcccatggtgaaggtcggtctgccccagctgtgctaagacaaacaaaaggaggggagcagggtgtggcagatggcagccagcagggctgcagggagggctggcggatggcaatagggcatcctgcatggcagggcatccaagcaaggcagcccagggcgagctgtgaagggggcatgggcacaaaggggcagcagctctccttcacccacccagggagtccccttctgggctcctattttgtcataacctggagggcttgatattttgtcattccatccactaccaccctttacatctcccccgcaagaccaaagacactccccattaagacaagaggcaagtggattacttggtgttgggatttgttgtgaggtttgctgacaccttgaccatttttcactggctggaaatgaaaggaacttcccacttgctctttgaaggcaatttcattctctccagggtccttatttccttcccatattctctcacactcccaaacttctgaagaagggagcaaactttggccacgaggaaggagtggagctgaaataagagagtccagggtcttggaggtgaagggggaacggccaggtcctctagtccaatcttctttgctacctcccccctcttctcgctttgcccagaccacacacctgcctctgtacttgtcactgcacctgcactgttgaatccacctttcctgggtcacgccgctgtgctgggtggtcacagcctaggaccctgtagagccgcagcctccatgtgaactggattcaggtctggtgctgtgtcctcagttcagtggcacacttgcagctgaacctcttggggctggtgggcaccaagggtcagaagcaattctacccaaagatgctggtgctaccaactaactcctcaaggtagataacaacatatggctgtgcccaacctgcactggctgctgacccaaccctaccctgtccagcccctctacctgagtaaacactttcagctgccctcgagaaatggtaggattggctatgtgctgagcctagtggcactgcagctcatggaggcagcaccggcttcaggccgctgtggccttggtggtccctttgatggcacggaggtggataaatgcctgcatcagctgacactgagtttgtggacaccagggacctctgcagctagctgggaaatctttcccaggaggtctcccaccccttccctctggaacaccccctgacgaggccaggggaggaacccctactctatgttctactctggtacctagtgctcacggtgagcaggctggctcggggcagccctcctcagagctggagcgcctttcaggtgccctctgaacagatactgttcagaatacagataaacagatgccaccaaggtcccctagctgtgcagtggaggggcaggtttcaaaatcagatctgtctccaaagttcctgctcttaaacaaagctgtcccatcttcccacccctctccatgggcctgtcctctcctctaagtaccatatcccaactctcccaggactggcatcatcttaagagtcagtgccttctctgttcccagggtccccactgactccaacctgcccacgtcctccactacatgaacccagaactgttgtacatgatggaaccacctccatgcccatgggtactgtcctgccaccagccccagtgggaggcacctctgcctgtccctgtccaaccccagtaccccatcttgaccaaggccatgccctgacctgcctccaagaacagaccagcagctcaccccctagacaaaatcacttcctctttaattgctgttgaagaagattcacaccactgcctccaaggagatgggggggcatttcccccttgcccccacctctctcccctccccaattacctggtcctttgcaaactattttagccagaaaaaaaaaaaaaaaaaaaagaccggaaaccactgacacagacagcccaagggctgggttggctgagggaggcagggctgggccaggtaagtccgccctatcacccagtttgtggggaaggggcagggggcctggaaaccctcccagccacctcgaatcctctcagccctggctgggagaggtcacgggggtgaggaatggctctggagctgctccagtgggagggaggggctggacagaaagaataatgggggaggggtcccactgtaggggtgccccctaccccagatcaccacgggcgctgcacagtcacaggtacgcagtcacggtcacagacacaacccgagagcacccccaccccaacccaccccctgcccaccctgggcttcccctaccccaaaacgccctccccacgcccctgcccgcccccatccccatgttggggaacaaagcaataaattacaaggcccccgcagccctcttagcccgctcctgctccatcccttctccctcccaagatagtagtgggagggacccaggctcttggttccccccggactctttagcttccacccatgggtaggtgtaggggacgtcctggtttccactactcacggtccctttcacggaaagggttgggaacccccacccccatgagcagcaggggtcctgcccctcgctgcccttgcccccttcactgggcagtgagatgagcatggaaggggtagggtttccgtattggccccaagtcccggggctagccctcccatgtactaaaccctccctctggcgtggcgtcgccccaggagccagcctgggtatgggctcccgccctgggattgttgagctcgggcaggaccgggtcttctttccgcccctagggggcacaagcgggcatgtccaagcgcctaggagcccgtaccgctggggacctccccttccgcgaaccccgagcgggtagacccagagcaatccgagtgtggaaacaatggagagggggcgtgttgagctggggtctccatgcctcgttggggagagggaggtgagtttgtgtcttctggaaggcgtgggggctgtgccctcgtgggggtaggaagtgctcccgtggggcggggtgcggatcggagaggtgagtgggtgcgtctgtccagcggtccgcccggtgtggtcgtgcccggcccgcgtggggatgggggtgtctctcccgctgggcaactataccagcgcaaccggggcgtcggcgcggcccacgctagcggcgctgctccggcggcgggggctgggcgtggcggtgatgctgggcgtggtggccgcgctgggcgtggtggccgcgctgccgccctcacccgggcagscgtgctggagaaggatgtcggcgcacagmtggcttccagcctggcgggcgtagaacagcgccgtgcggmcctgggcgtcacgggccgccacgtccgcgccgtactagagggcggaaacggccgcgtgaccgmgcgtccccagggcgcccacacccggcgccgsctcccccacatggscaagsctacttccggggtccctctkggaatttcgggctttcccgcgccaggcgttttccgagatgaagcctcaaagaccccctttcctccccccagctcacgtacccacagcagcagttgcgtsatgacgacgtgggcgagctcggccgccaggtggagtggggagcgcagctgtgggtcctctacgctggtgtcgagcggcccgtgtcgcgcatgggccaaaagcaggagaacggtagccacgtcctgggcctgcacggcggcccacagctggcggcccagcggctcctccgaggtgctcagcggcgccaggaacagtagctgctcgtacttggcgcgaatccacgactcgcgctcctccctgcaagaccagggatcaacggaaaaggctctagggacccccagccaggacttctgcccctacccacgggaccgtctcaggttcgcacaccctcagcaaccctccccccgctctgttccctcacgcttaccgcgaagagtcccgcgagggcttggcacggcctcgcgtgtcgctttcccacacgcggttggccgtgtcgttgccaatagccgtcagcaccagggtcagctcccgtggccagtcgtccaagtccagcgagcgaacgcgggacaggtgtgtgcccaggttgcggtggatgccagaacactcgatgcagatgagggcgcccaggttcaagctggcccacgtggggtctgcggaaggagcgtagaggtcggctcccagccgggcagcacaggcaccccggcattcactacactccctagcccctccgctgcctcctggcactcactgggggccccgcagtccacgcagattgaattccccttggcgttccggatcgcctggatggccacggcctcgctttggctgtctgtgcgcagctgcagagagggtttgggttggcactgactctgcctccaagccccacctccttctcagacacctctgctctcctctcacacgacttcggccgtgtcgttgccaatggccgtcagcaccagggtcagttcctgcggccagtcctccactccacctcaaactcttaccttgaccttgctgctctcacagcattgcagactggctaggatctgactctcgatggcctggacccaggcatcccgctcctcaaaactggctgcctcaaagtgccacgtctgacccgtgctggacacgatcaggaactcaaagttttcctctgagtgggggatgggatggggtcattaagggacagagttcaagcaggggctgcctttcccaagaccgtcctccctgatgtccatcccgagcccctgggagtggggcagtgggggtagggaaagcagagggtggggggcagcaggaagcccgagcacatgcaggggaaggcgggggcacccccacccttctgcaccccagctgagcgcccctcccggctccccacttgttacctgctttataaatatttcttaaactaccaaaggattttagtttccacattttgcgcttggctggtttcccgaagcgaaggagatagagatagaatggagagcagaacagagaaagagagaccaagaaagaaggagaaaaagacaggtagatggagagatggagagagatagtgacagagtgccagagacaaagcaggacagacagatggggagagaaagcagaactaaagtcagtggccccggagcagagtggaacagaagccaagagccatgagagtaggcagatctggaacctgggtctgagcacccggcagagagcaggggcagcagggatgggttatcaagaccagcgaggagctggacctctgggagaagaagggagggtcaggatctgagtgaacacgggggaaggggacagaagctggggcgcagggctgagatgagagggccctggggctggtggcagtgggggtgcggggaatcactgagggacaagaatggggatcactatggtcaagggctgttggggagcacttggcaatagaaagttatcgggagaaggccgggcacggtgactcatgcctgtaatccccaccgcctgtaatcccagcactttgggaggccgaggcgggcagatcacgaggtcaggagatcaagaccatcctggctaacacagtgaaacccagtctctactaaaaaatacaaaaaattagccgggcatggtggcaagtgcctgtagtcccagctacttggaaggctgaggcaggagaatggtgtgaacccgggaggcagagcttgcagtgagccgagatcgcaccactgtactccagcctgggtgacagagtgagactccatctcaaaaaaaaaaaaaaaaaagaaaagaaaaaaaaaagaaagaaagttattgggagaaggggctgggtggtcacagaatccaggatctggggaatcagtgggagatgctgagataaggggctgaatcactggggatcagcggggctgccgggtgcaggggctggggtggtaagtggagttgagggaaggaagaggaactagaacgtcattaggagagggagcaggagctatagacatggacatcgttgagaacaggggctggggaaaggaattagctggggaacaaggaaagaaggacaggggctgggggatgtccatccactctttcactaagttgtgtgcagtggtaatggtagtcaagcactcagctcaggcacttttcctcctgctgcaggagttaggccagggagctgatgttggggatgagggttctgggtgggagtggaagtgcctgccagagcctcaccttcagcctgcccagccgagccttcagtcttggatggtgttgtcaattttttcctcctctgcttcttcaccatgggagaaggagggggttcccgactcagggggctcaggtctccagatggggtacagtcttagggaggaagacacagctgcctcagtagccccctccacagatttcctgatttcttgatagcctgtctcattccctgaactagctttggcattttagggctcccctcctcaactgtccctctccaggagttcccccttgatcattcctggggatgcagggagatgagaggtttagagtcagtcctgcactcagatcctggttctgccacttactggccttaagaccttgagcaaggcacttaatcttctgagcctcagtttctttatctctgaaataggggtaataatcttgacctgacaaaactgttgtaaggatcatttgtttacaatgttatttgcatactatatatatatatatttttttcaaacatgtcaaacatggctgactatgtactagacaatattctcagtttgtttaaacctcaaagcaaccctctgaggtagaaactattatctccatgttacagatgaggaaactgaggcacggagaggtcaagtaacttgcccatgtggcaagccaggattcaagctcaggcagttgacgttagagtccacttgtcttaaccattatgatagacatggtatgattgaacttattcatgtgtggggctccatgtgttcactcatgcatttattccagcctccaagccttcaccccatattcatttcccacactcatcctatttgggtgtggaagacagcagatggaaggtcatccccactgacccgtgctgagggctcgggccaaattccggtctggcttcagcaggtgtttggatgtctgatctggtggtggctgcagggaactggggctggggctagggcttggcatgggagtagtggcttctgtcggaagaagatgaaacctcagtgagcctctttcttctggccccattccttatgtggtccctctttatcacccagcttcctactcgcccagtgccagccccctcttccctcttacccctctttttccccagccctggcccctcttctgctcctatgtcataaaccttactcacccaggccttcacccatctggacagtgctcatgtccttgacgagcccgttaatgctggctgaggggccaaaggcagagatggccctcgggggccgcttgcccgggactttgactgttgttcgcagcaagtccatctccttgccgtgggtactgtggatgtaatcctggaggggtacagggccgagagtgtagggaaggttggggtccttggtatgctgggaagcagtcaatatggtacagaatagagagggactggggaggggtcttgggggccaaatgggttgtgatgaacatctaggggatgggcccatcagacttggcccagcaattgtctcctccagaaagcgttcccttcctgggtgctctcccactagactgcaagttcctggggcaatgtatttacctttacattcctggcatgggcacatggtgggctcttaacacatgcctgctaaacttaagagaagaggactagcacttcctagaaatgaggttagtgctttgtcagaggcatagacaggtagaacttgagggaaatccaaagctggccaatgtggcccagtctctgccactcacgttaatactggggtggtagagtagaaagccattactggacagggttacatatttcttcttccattctttgttcaaggaattgccacttcgttttagtaggaagctctggagaaaggggaaagacacatgtgggaaaaaagccaactaagaccagctgcccctagcctgtcccagcccctggatcactcacctgtttgatggggatggctcgcccactccctgttgtctctccccgactatccaagcttcgtttctcggagtcactaccccgacgattctggaatggttattggaatcagtttgaggatggatagagggatacactgatgtgacgatagggaagatagatgaagaagggcccaacagaggagtctagggactagggaagatgggcaggtcatgggggacaggaggatgggggtcagcatgtccatgtccaataccgcaaaaaggctggtcctgcgcttggctgcccggtgcagggaccctggggtgctcaatccagccactgcagctgcctcggctcggagctcccggtgaccaacattcggtgaggacgggagggaagaagagtagtcgctagtgtggcccccgttactagcctgggcacatatggaagagtcagcagagctgagatgccccctactccaccaagctacactcatatctcgttatggggaatttgagacattccttgatcacctcaccatttatttatgttgtcattaataatttttaaaatcctcactaacattgtgacaatgctttaaatgttgtaaaggttgattcacaagtattgtgtcatacaatcttcctgatagccttgggaggttaggtgagttgcttaaggacactgcaaatgatgtctcaaatctggttgatttccagtccaatgcactttctgccaatagtttcactgccatttccatctgtttccccactccctgaacctccttgggtactctgtacctgtcctaggatccccagcccctctgcatcttaccggcccctctgcagactctgaaaccccaactcacctggccagctaccggagtggatgcagctgagtggcttggggagctgggcagggacttgcaggcagccagaagctgttgctgcttgcgcaaggtcaccaccttctgggccactgaggggagttgacggaaggaggtgtgagcaggccagatacccaagaccacccttccatgcccagctttgagaaatccccagtagacaacacaggacccaacttccttgtcactgtggcctccatgccacctgtggccttgccagctcctccagcccagaaagaccttgcgactattaagcaaaccttctctggcctccctgatctctcctccctcccacaaaggctaatttcctgtcactcacagagagaggcctggatgcctgaccactgagaatatcccaggccccttgctctggcttcccacatatgctggagatcactacactcaccctcctggaagacccgatccacattgagcccataggttgcacaagtctcatagtagctgcagcgtttcatgtccgcgcacagagctctggcacgagcatctcccaccacccgaggggaggaagcactgatcctgtctgaggggacaggaaaggggcaggattgaacaaggagccccaccttgttcgatttttcacaattcccttatccttgcactgggccctcaggctgggtccactggggatggggtgtgagagatcatcttttctgtgaccaggtggaatgggagtacataagccctttctgagtactgggcccagttcacacacctagctgggtgagctgtgtgtgtgtgtgtgtgtgtgtgtgtgtcctcaaggaatactccagagctgctgagtggtgcttcctgacaaggtctacatagctgagacccaggcgcgagcgacaatcaccctgccctgcaaatccatagaaccctgaactggtgggaggacaccagcttgtgaactaggaaaaggttgggtgcccatgggtcatggctggactgcccactctgcagcaagaaaccaggatgcaagcaacaggtggagataggcaccagcagaacaggcatccagaccaagtcccaccagctcgacacaggggagtgctggaaaagcatttcctggccctggcagagtctgggagcctctgagtcacttctttgagaactaaaaggttttctgctctcttcttttcatcatcatttcctttgtgttttcactttgtttttggataagttcctttaaaaggtgtcagccttacccagctgtcgcaaaaaggaagatggaaaaggtttcctatccacactaggacttgagattttctgtgtcctaggatggtggcactaggaaatggcagtgtcagaacacaaggtaggtgacatttcaggagaggcaaggagatggctac

SEQ ID NO: 6801 - DNA, 238910 bp, Homo sapiens
  misc_feature (1)...(238910): n = A,T,C or G, or insertion/deletion polymorphism (see Tables 1-2)
cccctaggtcaatctgagcttctccaaagaccttgccttaactacagagaagtttgccgtaacctctgaattctctatttccctcccatttgactcaaacttctgtttctcctggccacgccgaaccttttcttcatttatccccaggaccctgtactctcctggttatttaatttctctgagtattctccactctcctgtagaatggtggccctcttcacacagctccactaggcagtgccccagtaggaactcagtgtggggcctccgacccacatttccctgctacactgccctagtagaggtcctctgtgaggattctgcccctgcagaaggctgcttcctgaaaacccaggcttttccataccacctccaaaatctggggagaagctgccaagaatctaccactcttgtactctgtgtgcctgcaggtttaacaccccgtggaggctgccaaggcttatggctttcattctccaaagtggcagcccaagctgtacctgggcccctttgagccgtagctggagctggagtgaccagggcgtggggagccctgtcttgagcctatgcagggaagcagggccctgggcctggtccatgaaatcattctttcctcccaggcctctgggcctgtgatgggaggggtttcagcaaaggtttctgaaatgcctttggggacttttctccattatcttggatattagcagttggcttttrgttatgcaaatatctctagcaagtggatgcctcacagcctgcttgaattcctctcctgaaaaagctttttctttctctgccatatggccaggctgtaaattttccaaatttttacactctgctttcctttttaatataagttccaattcgaagtcatttctttgctcccacatctgagcacatgctattagaagcagccagcccaaatcttgaacactttgctgcttagaaattttttccaccagataccccaggttgccactctttagttcaaacttccacagatccctagggcatggacagaatgcagccaagttctttgctaaggcataatatgtgtcacctttgctccagttcccactaagttcctcattaccatcgaagaccttggcagcctggacttcattatccatatcactatcagaattttagttgcaacttttaaacagtctctaagaagttccaaattttccctcatctttctgtcttctgagccttccaaactcttccaacctctacccattatcttgttccaaagtcagttccacattttcaggtatctttataacaaaaccccactcctggtaccaattttctgtaatagatcattcttgcattgctataaagaaatacccgagactgggtaacttataaagaaaagaggtttaatctgctcacagctctgcaggctttataggaaacatggtgctgacatctgcttggcttctggggcagcctcaggaagcttataatcatggaggaaggcgaaggggaaacaggcatgtcacacggtgaaagcaggagcaagacagcgagagtatgggacaggtgccacacacttttaagtggccagctctcatgtgaactcagagcaagagctcacttatcaccaagggtatggcccaagccattcatgagggatctacccccacgatctaaacacctcccaccaggccgatctccaacactggcttttataactcaacatgagatttgagcagggacaaatatccaaactctattatgtatttacgctcaggagtacaaagtttccataagcaccaccattgcctattccttaacacaatatgttaagttataaataaacaatatggtttgccacttaacaagaagtagaaagttcagtagcacatccttatctccaatgctgccagacatgtaactaagtgaggtagttattagcttccttttcataagaaaattcaatgcttttataaagtttttcagtgcctctagaaaagcggaagcctttacaaaggagatttgctttatgttaattatgcaaaatcaagggttattaacaaaagaccatgtgaatgagagaagctgaggaatgtaacttcatcttactctaatactcaaatggcagataattatttctggacagagtatggagccacagaaataaaatactctaaccttgaaaattcagctactcaggaggctgaggctggacaatcacttgaacctaggaggcggaggtttcagtgagccaacatcgcgccacttcactccagtgtgggttacagaatgagactccatctcaaaaaaacaaacaacaacaacaacaattcctgctccctttttgtattatggatagacatatcaactttatgggtgacaattacattggaaaggacagtgaatgcgataagtaacaccatcaaatccaaaaggtcttgataagctacaacaatgggccaattgtaacagacgaaatgtgacagatataagatcttcctcttttatcaaaaaatgaattgcaaaagtacagaatacagggaaagtttaacaataacatgaaatgacatagtacttttctgaaagaaagattaacatgatgtcactgtcaaaaaaatgatgcttagagcatggactgcatcattagagtaacggtatcatttccactcagaagggcatgcttttctaggaggcatattggaatatctgggaagtgtgtacctgaaattgaggaaagcatagtcaatattattatgtaattttaaaattaaaaatacagaaaaaaagagacaaaatgaagctttacaaaatcttccaggctgggcatctaggaaataagcagtgattttttagtgggttagggatggtcaggcttgggagcatgacattttcgtgtatagccaagggaagtagttattgagtaattcagtttttgagtaattcagctggaagaaggagaaaagagtcaactgtactctcattcgtaagacccaccgtatatcctctggttctgctttacatttaattcacttgtttccaaatgtttattgagcatcagctatgtgatacgtactcagcgcactgaggataaagcagagaacaagacagccatacaagactatcagctgatgtctcccagcttcacaaagcacacttcccagctccatcttgcttgatttcctgagccagtcctgaggcaaaaaccttaatattcttatctggtgaaacatacattgagccaacttcccagatctagtggccaagggataagtttcctgattccaaattgtgtcaccatgaagtttcactgctagcaatcaggaccctggacaggctaaccatcatcctagcaaattaatcaaacctgagaagggggtgtgggaaccctgatttatagctggtcagtcagaagtgtaggtgacagtcaacctaaagtcttgtggaaatgaacccttaacttgtgggatttgactataagttgaggtagacagtgtcagaattaagttaaactgtaagacaccgagctggtgtctgctggagaactgtttcatgtgtgggggattctctggtgtcagaagtgttgagccagtggagagtagcaaaaacagtttggtttttcctatctcaaacaggagtgaaaacaaattcctatgaaacagaagtgaatggaggcatgcagctcaaaataacttcaagagagacatgcaggagggctgggactctctgttccaggtgtaacctggatgtggggctggctggtgcagtgtgaggggctaaaaccaaagtcagggagttgccctaactggcactcacaatccaccatttccctccacctgcaaaggtagccgggtgatgacctgcaggcataatactgggttcttgcctctgaagaaattcgactatcagtctagggatctaggaggaaaacaatacaaacaaacaagagaccactccagctatctagaaaaaccagttcagatcttcacacttgaactcaaaagaacaaccaagaatcaatcaccagagaggggaagaatctttcttttctagggaaaagactagataaatacacgtaagaatggacccttgaagaaacataattgagtgaacagaagagaggtttaaaaactattatcctcggtgatacctgagaagagagtacattcatgaaacaaatgcagggtgttattataggccggcagtccaataggactggtgtccttagaagaagagacaccaagggtgtgactgcatagagaaaatgccctggagggacaccaagagaagacagtcgtccacgaggcaggggagaggccacaggataaatcaaatctgctggcaccttgatctagaacttccaggattgtgagaaatttctgttgtttaagccatccaggctgtggtatattgttacgacagccctagccgactaacacaggtactgtatgtcttcagcctacctaggcaagattcactattagaaattgatagaataagaaaaattctgattgcttcaaaacaggacttttgctttaaaagagttaatgattcaagaaataaatgtattaggagattacctactaatacgtattgatgaaattatgaagttagaaaatcatcagtggatgctaaaacttgtgggtaaaaattagatgaggaatggggtgtaatcaagtagcacctccccccagcattatttttaatcataaagaaaaaaatagtaactttatggtgaagaaacctggcagacactaccttatttaagtgaacatcacctatactgggagaaaccgatgccatctgtaccttgatatcatgcactggaaaagacacatcgctttagtggtgtttctccaaaaattcataacctgaaagggaacatcaaacttactttgaaggatattccacacaatacctggtctgtattcttaaataatgtctagttcaataaacataaaagccaaggacggttccagatcaaagaagactaatggaggaataactctttcatctggaatgttttttaagcaagaaatacctgctttcgaatttaagagtgcagatcctttttttatccaattggttcggagatataattacattattttaccacatctccttaaggctttgatccctgctacaatctacaatatataaatgcatatgtgtggcatccgtcttatcatcaatttaggtgaccagtagaagaaaagtgcctggtgccaatttttattccatagtataaaatagtctctcaggacagggtttttggtgagagaagcacaggatgtygctgggtgactgagaccgggtcaggaaatagggaggcagagggcaacagtttctctagaatttaaaatttggttgcttttggaagagaaagcaagagattcctggaagccagaacgtcatgtttcacaaatgtaaaagtcctagttgggaaagacacatcgctttagtggtgttttcaaatgacttttaaaatagtagggttttacttgtaggttctagctacaagtaaaaaggctaaaagccagccttagaaacctgtcaaaaaagatttccagcagggcgctggggaaacgcagaccgcgccggaatccccgcctggagaagctcttaatagggcgggaaactgcgtgccccacaaggtccctcagaggcacattgtggagacgggctcagggtagcaacttctggcgagtggagcggctattacacaagcgaaacattcggaagcaatttacttccagctttcgcaacacccaccctgagccaccaccctcccttacacagtcacgccacaaacttccccacttccgcccacagccctctgggcttcgacccatcaactgagcttgcgccaagtctactgcgcacgcgccaacttcggcccaatcagcgtcccaaaccgtggggtggacgccaccgggataaactatcctcagcgtggggcggggtctcgaagccgaataacgaacgtgattagccagcctcttccacagacttttaagggcggagcctggccctggagacacgtctggagagctgttctcctaatatgggtagggtcgggcgtggagctggcagcggcgctgtgtgcgcctgcgcggggcgccgagacagggcgtgttcgctgttcagtgcsggtgttgcagggagtgagggcagctggagtgcgttctgccgaagcttgtggttgcacgcccatcstcttaggggctaccttccgtggtgagtgtgtgcggtgttgcacttggggttgcttctcgctgcgtggccgcagcggggctgaacccttcccactccatcccctccccgcacccggaccagcccctgggacgccctcggacgcccacccgctccaaccctggggaagcctcagagtggcagcgaaggcctcttgcctttccgcctctgcgcttgctgtcatcgcccacgtgctttgttgttgttcggtgcagaccatgtccaagtctctgaagaagttggtggaggagagccgggagaagaaccagcccgaggtggacatgagtgaccggggcatctccaacatgctggatgtcaacggcctctgtgagttctcgggcaggactctcccgtggatgagctggaaggctttctaagtttgccaattcactgctggtcctgctgtgagcgattgtactggtttagaccccagcccctgcttgtaaacctcacttgtcaggggcttcgcgcagagggtttgcagtaggatttgttctgttccacctggaaaacgatcctgagagtccacgatgagaatcacacagacagctgtgcctcatcggttgtctctgctgtatggcattgaggtggattttccacagtttgcttaatagtcactttaattataaattgaaaattaattttgagtccttcttcctgtctcctaatacagtctttgtccatgaacaaatgacacagaaaagttccatgrttaataagcattcttgtgcctggagcgttttaagcatttcttgaatctttacattcttctgagtatttattctccgaacttggttcaggcttttgtcacctcctcatgctgtggtgaaatcctcctaacttgccctcttgccttcagtttcactgcccagtttaatcactgggtcactttcagtgtcattttcctgtaacccctgtctatggtgttaccctctcccttaaaaccagggattgcagattcacatgcctccaagtgagggcggtcaggggcggttatgaactaggtgataggtgtcccacttgaaggggccagctgctgcacctgctactcagacacatgtcaccataggaatgttggcccaatgtgccagattattttcttaaaggaaccaagattctatatttttatgtgaaatttgctaatttttagatgttggctactaattctaatatttgaaaarcctgtgataagtgagctaaagcagttcttcaggctgacgtggctttggtttaaaccctctccgcacttctccaggttgtccattatcgacggtaatgctccaggtttcttggcgtgatgtacaagscctttctgaatctgaacacaaccttacccttccatgcagctggcattccagccattctgaacctgttgcccttcctggaccagagcctactcgttcagatcttggtgcctttacaaattctgttttccctctttctcagtcrtttgcacctgaaatccttttacttctaagagtcagcttagacatcaccacctgtgtaaaaccttatccgtctgcaccaggctaacatatcccttccctcctctgtgaaggtggtcgtgtgtattgctttgtgactcctctcacataggattgtactgatttttttcttttttaatctagaagtctctcttctctgctgggacattgggaagacaaaagctgtgcaatattcatgcttgcattttttwaataatagtgcctggagcacagtagatgctcaaaaatagttgaggaatgaagaaaatgaaagaatgatggattaggcctgtgagtttgggatatcaactccaggatgtgacaagagagaagaagggagatgttcaggagaccctgaaaggcgatggatagccatttaggcatggagagaactgcagagtcaggtttactgtgaattcacggttttcacggttcgaaaacctgcctgggacagaggttggagttgatgctattgatatgtcttggcagaaggaaaagggaggaaacgtagatttgcgtttcgtaggctttatgaaaatacgtgccattaaacttaggttgtgtactagttagcctctcaggcttggtgtgtgttggtctcttgcattccgtaagggtccttgctgtcagcaactgagcagatgcctctggaattggatatctgagtttgccccttgctgcscctgcccggctctgccatgaccatggtcattattgggggcactgttgatacagaggagaaagagaaggggatagggaagatgatgcatagcgggaaccttggccccatggccttcctccctacagcactcattctcaccaggtagaagagaggctgctttcagcagaggagctttgtacccttcggcttttgaagaggagactttatgtaatatttataaatggggagaatggcttagctatttcggttcagctccgttatctctttgaagccttggcttttattaaggaagaaaagatagccacttgcttcctgaaatatatttccggtataacattgggtggtgaaaagcgagatcattcttaaattttcctaaagaagtagctaacaacggataatagtactttttgggaagttgggtggaagtgaatttggagatttgcagattccayctcctctggcttctgtagcattgagccaaggctgctctctgcaaactccctgacctcaggacttctcggagcctagggggttccaggatgctcttcgaagcctccaccagggctcacttctcagcagtgcacacacactgacacagtgcttaatatatacaagtattaaaatacttcacatggctacattaattataagtgtaagaatttttttttcttttttttttttttttttcctgaaaacagggtctcgctctgtcacccaggctggaatgcagtggtgcagtcacagctccctggggcctcaccctcccaggctcaagcaatcctcccacctcagcctcccgagtagctgggactataggtacacgccaccacgcctggctaatggttttattttttatttctttgtagagatggggtcttgctatgctgcccaggctggcctcaaactcctgggctcaaggagtgcccccatcttggcctcctaaagtgctggcattacacatgtgagctaccacacccaacctccatgtttctttactgataaacttttagctgtaaccaggaagttttatatactagtatccagcttaaacacagcttaaacttgtatgtacagagaatagctgtttcttgcatctcaagttttccctttattattcttactttgtttaatttctcaagaggttagaattaagctttgaagataaaagtaaggttttgtactactaagcatatgagatgcccgtctttyttcctgggagagttgtatcttctaacgcagcccttccttagagacagcaaattacytttaaaagatgttttgaggagtttaggtaccaasaactttctgatggggaaaacttcttagkctggagacaggtatcagacaggttstacagttttstagtagtccagccagattctagaaatgctcacttcctaccatgagaggcagaggagtacagcacataggaggggaacctggatttggatagacgtggattcaaattctgctagttagtactgtgtaaccttagagaagctacttaacctctctgatcctcaagttacttaataattggtagcctaagaaaccacttcataagactggtttaatggtttgcgttaaatgcaataatgcacattaaatgttagttattaactagtgttagatccaataatgtacattaaatgttaactattaatatgaatatccagctatagacccatatgtctcagacatacccagttccaacatagtcagtagcctgaaccaagaactttactttgttaactcgactgggtaaggcatttgtatcaggtgttggaattttttgtgtggcttattagaacctgtagtgtttggtacttttgcctaaggttctaattgatttagatagctatttatttaaaatttgtcctaatttatttattttccatcattttgttttaacatggcatgtaatttgcacacacattctcgttaaagcttccaagaacaccagtgtgggcaatagagtgagaccccatctctacaaaaaattaaaaaatgagctgagggtgatgtgcaagtcccagctttcagrgaggctgcggtgggaggattgctggaacccaggagtttgagtttgtagtgagctatgatcgtgttactaggtgacagaacaagaccttgtctcttaaaaaaaaaaaaaagcttcccagcataatcgtaatgctgctgattttattctttttattaaagagatttcactgcagaaactctttcccaagcagcagctgtcttcatctggttgataaagttgattttgaagggccctgtaatcagcttccatttccatagagacagaatcccagctgtagccggaggaactttctttcatttctcttatttaagtgtttcctgattttttaatctcttcaagtgtattgccctctctgggtggtcaagcctttatcattttttttccaagttagactaaaatatttttcagataaatctcgaaaacaacctgctttcaagggagtggtctttctaaaggaccaggcaaaataataaacaaatatgatcatgggttatctggaagagctrtctcaaaagtcttgttaaacctggaacacatgctatccatgtcgaccttctttgggggatagattaaagagctggggaggacctgtaattttagatataatctattaaaatcatttttttgttttttaatttttgttttttgtttttgagatggagtcttgctctgttgcccaggctggagtgcagtggcgtgatctctgctcactgcagcctccacctcttgggttcaagcgattctcctgcctcagcctccccagtaactggggttacaggcgtgcgccaccacacctggctaatttttatatttttagtagagacggggtttcaccatattggccaggctggtcttgaactcgtgacctcaagtgatccacccgccttggcctcccaaagttctgggattacaggcgtgagccactgtgcccggccttaaaattatttatgttttcactcctctaggttgtgtgtatgtgcccacctttctgtttttaaacacgccgcttcttggcctggggagcccttttcgtttttctcgctccagctagcccttgcccccttgtcagttagtgcttgttgaaagaaggaaggacttaactattcacatgactccatttcctgtgacctcctcaaggaggcccctcgagaatactcagttctgacccaccatcccatccagcctagctgaagygtctctctacttggcatagtacttgggaaaaatttattgaagaaggaatgttactgcttttagttaagagattcaggttggctaagggagaaagcatagctctggagaaggagcatgtactctgtctccttcctgcaggcttctccgcagtttccagagggaagcagtttccagctatcaggaacaagatggaactgacaacttctatttttgattgtatgatagggttaaaactggaaatgcttcattgaaacaaagaagaggtgtagcccctttggcatgactgaatcggtaatggcatttgactttttgtcagtcctctgacattctggctctagtggccctggtggcttttttgtaagcatcttttttgtttgctactagctgtgtatccttgggcaagttgcttgacctctctgtgcctcaggtgcctcatctataaaatgggaataataagagcacctcatagggtcattgtgaattaatatctataagggcctagtgtaccacccggtacstgatggtcttaatacttgctattattagaacactcatgcattacttaatggtggggatacgttatgagaaatgcataataagattttgtcattgtgtggtcattcccagaatgtccctacacacacccaratggtgtagcctactacacacctgggctagatggtgtgcttgtgactcaggcttttgctcttaggctacaaaactgtacagcatgtgattgtatggaatcccatagggaattgtaacatgatggtgagtgtgtgtgtctttatacaaaaacatacagtaaaaatatagtacattaytgttatctcgtgggaccgctgtcatatttgtggtccattgtttgtttgtgtttttgagacaaggtctcactcttgttgcccaggctggactacagtggcatgatcttgcctcactgtagcctcggcttcctgggctcaagtgatcctcccacctcagcctcccaagtagcgtagattacaggcacatgccaccactgccggcaaatttttgtaatttttatagagatggggtttcgccatttctcccaggctggtgttgaactcctggactcaagcgatctgcctgccccagcctcccgggtggttcattgttgagtgaaacattattaagcggtgcatgactattgtaaaaaccattttatctgtgatggtgtaacaagtgcaaaacaatatctttatttcttggaaacgttggtgatggtacttctcagtggtctttgcccacctgtcccatggtcttgtcaaaccagcacacccactgccttattcctcacctgagtcagaattcccaggagaagttgggcggctgggcccagtgtgctagggtcaagaggaacagccgttgccacacactggcgagttcagagctgtgcatagcccggggggcggctgctgggggaacagcagcaggattttcgttgggatgtgcttgtggccaagtttctgttgagaatggcagacatgctttgaaaactggtaatttttccactaataattaaaatactctgtgtcctgcagtaactatttattgaatgtatttttttatgataggcattatgtaaccagagttcgtttgggagtttacattgaattttttaatttctatttttttatttttttattttttgagacacagtctcactctgttgcccaggctggagtgcagtggcgccatcttggctcactgcaacctccgcctcccaggttgaagcaattctcctgccttggcctctggagtagttgggattacaggtgccagctaccatgctccgctaatttttgtatttttggtagagatggggttttgccatgttggccaggctggtcttgaactcctgacctcaggtgattcacctcccccccccacccccggcctcccaaattgctgggattacaggtgtgagccaatgtgcctggtcttatattgaattttaaaattatctactgagaaattattgtttgttatgttaagatgactataaggtgtctattacatgtgaagtagttatattttcaccataagaactataacactcactgctttgccattataaccaatgctacaattggtatggataataattgaaaaccataccctgtattatttattcataaattcacatgaacctagttgaaagaaaacacaatctagatacaggagatccattgttagagaaaagactagagatgactttttttttaattcagcrtaaagacctcttctttggatagcaagtttgtgcaggtgggttaatttttttattttttaaaccaaaggatgatgtaaaaatgtggccaaggagcatttggtctagatcaagtgtgtgagcagcaggggtcagtgttgagccyctgtgttttgctcctgggctccctgggaggctggacacagctcgtctcatctccacacagagctttgctgcckctacagttcttccaccttcattckccaggttctgtctttgggtagagagatggagtcttaatggcattttatctgtgtagctcacagtgaaagaaatctcacgtatgttacagtcaaccagagcatctttgaggttggcatgtttcacagctgccttgcatgtggcctctgaatagagaagtgctgatcagagcatgtttccaatcaaaggaaatggaatttgcagtgtccccattgagcagattccatcagcgtgtgatgcttaatgctgtaaaacagtatttcaggtttgaggtgctagcaaagcccaaaaggccaataataggattaatagtacctactttgttaatgtcctacggctgcaaaacaaaacaccgcaggctgggtgattttgacaacagaaatttatttcccacggtcctggaggctggaagttcaagatcatagtgtcagcagggctggctgctcctgaggcctctctcctgggcttgcaggtggccgtcttcttgctgtgctcacatgatcttccctctgcatccctgctgtccctcagtctgttcagtttcctcttctcatgaggacaatagtcagattgggatagggtccaccttaaggacctcattttaacctgatcgcstctttaaaggccccatctccaaatatagtcacatgttgaggtatttgggattggggcttcagcatattagttttgggaagacatagttcattccataacatctagattagaggttctcaaatgatacagacctgagtgcctactctgtggtaagtgcttctcacactcataacatccctctttggttcacctaccgtcagcattttatagatgagaaagtagagagctatggaggttctataaagtccccagtgtcacwcaggcagtggtggaaacggagttcactttgtttttttttttttttttttttcttaaatggagtttcactcttgttgcccaggctagagtgcagtggcatgatcacggtcactgcagcctccgcctcccaggttccagcgattctcctgccttaggcttccaagtagctgggattacaggcacctgccacaacgcctggcgaatttttttaattttagtagagatggggatggggttttgccatgttgaccaggctggtcttgaaatcctggcctcaggtgatccacctgccttcgccactcaaagtgttgggattacaggtgtgagccactgcgcccggttggagttcactcttgagtgtgtctgaaaggtttgctgtgtgatactgtgctgtgttgtatcctagccccgaagggctcaccagggccaggcttggatgccaaggagaggtgactcctagggcctgccttaccgtaaggcattcattttcagaattctttttttttttttttttgagacagagtcttgctgtgtcacccaggctggagtgcagtggcgtgatctcggctcgctgcaagctctgcctcccaggttcacgccattctcctgcctcagcctccccagtggctgggactacaggcacccgccaccaagcccggctaattttttgtatttttcgtagagacgggatttcaccgtgttagccaggatggtctcagtctcctgacatcatgatccgcctgcctcagcctcccaaagtgctaggattacaggtgtgagccaccgtacctcgtctcagaattctttaaaacactgtgttaagcaaataaaatagtgttattgggctagccctgccagcttggaaacttgggtttayaggatggttgcagagctttaactgttgaagaaaacataagaagcaacttaatctccatcaatattagcagaaccctccccactttctttatggtttcctgaaaaactattaatctcaatagaatggaatgatcagatgtgagatctttgtataccgtatgttaattcattttcttttgtcttcaaacttagaacattagcttaaaacactacaaagtatggggctggaaaagattgtgttggggaaatattggttcatgtatcaaatagaataaacctgaagtacattaaatggtagttttagttatagtatccatacctcataaagatccttcttatttcatccgtttctttgcatatccattaattattcctttggactctgtgtaacttataattttaagggtgaggccaaatgaaaggcacacatcagaacaagcaattacttgcaaggaggtttcgcctcttagtttttcaggacacagtgcagaccggagaacggtaatgtggtttgcaatctcagtgtttgaatggtggtctatgtaacttggtgttcttaacagctgtaagtgaggctgggcgcagtggctcatgcctgctgtaatcccagcctgactcatgcctgctgtaatcccagcgcttccggaggccaacgtgggtgggtcacctgagtgaggtcaggagtttgagaccaccctggccaacatggtgaaaccccctctctactaacaatacaagaattagctgggtgtggtggtacatgcctgtaatcccagctacttgggaggctgaggcaggagaatcacttgaacctgggaggtagaggctccagtgggctaagatcacgccattgtactccagcctgggcgacaagagtgagactctttcaaaataaataaataatgaaacagctgtaaatgcttaagtctttagggcgtgtcaaagatgcctrtgtaatttattatatgtttgtattctacaacgttgtgcactctttgttaggaggatgaaaataatagataatatgattgaaataccatgccatctatgcatggagtgtattaatataatacacgcacacatttaccacataccaggcattgtgctaagccctctgtatggattaatctttcaaacctcacaatgtattgtcattatatagttaataggtaaggaaacagatttarggagcatcattaacttgctcaaagtcacccaggcaataagtggtagagcccagatttgaagccacacctgcagacgtcggaagcagtgttctcagcttctcctgttttgccttactggtttctgacagtcatatgcacataccctgtggaggagatgaagataacggctaattcagcgagcatgctgagtgcctgtggccacccggtcatgttctagaagccatggtagctgtcctgtctgggctaatgattctgtaacaatttaggaatgcattcagggacactacctatgtttatcccatttgaaccagggaaacaggaaccttcatcttcccaaaatacttacacatagttttaaaaaaatctattccaaaaaaccttattgaagtattcgtatcgataagtgcataatgacagtacaagttgacagattttcaaagcaagaaacattatcagtaggttgggagctggtgctcctcctagtcactctccctttaagtcctgagactgccagcctcctgagcttatactggtagttccaatggaaatacataacagaatgcaaggcttttacttaactcctccttctagtcctcatcttgacctcccttccactcggaagcgtgcctcttacagatatgggtgatgatagaattggaatatctcacagtctcagatttggtacctgacacgcaattaacaatactaatattactaatgccagtattgctaaaaacagttgtcttatgcatatgctatcttcattctccctctttaaaaaaaaaaaagctttttttttttttttttgagacggagtctcgctctgtcggagtgcagtggcgtgatctccgctcactgcaagctccgcctcccgggttcacgccattctcctgcctcagcctcccgagtaactgggattacaggcgcccgccacaacgcctggctaacttttttttttgtatttttagtagagacagggtttcaccgtgttagccaggatggtctcgatctcctcacgtcgtgatccaccctcctcggcctcccaaaatgttcggattacaggcgtgagccaccgctcccggccaaaaaaaggctattttttgaagagcagttttcgattcacagagagctggagcaggaagtacagatccacgtctctcctccatcccccgttcctagtttcccatattaacatcttgcattggtgtgttacgtttgctatgattgctggaccaatattgatgcgttattattattattattatttgagatggagtctcactctgtcacccaggctggattgcaatggtgtgatctgggctcactgcagcctctgcctcccaggttcaagggatgctcctgcctcagcctcagcctcccgagtagctgggattacaggcaggcgccatcacacccggcaaatttttttttaatttttagtagagatgggttttcaccaagttagccaggctgttgatgcattattattaactaaagcttatagctaacatcagggttcactgtatatagtatagttttatgggttttggcaaattaatgtaatgtattcaccgttacagtatcacatggaacagttacactgctctaaaaatcctctctgctttacctcttcatcccctctccctcattatctacctccaaaacctcagacaaccactgaaatgttacagtttgtctctataattttaccctttccagaatgtcatatagctggaatcgtagggtatatagcctctacagattggctacttttgcttagcaacatgcatttaagattccgccatgtctttttgtggttcgatagctcatttctttttagcagtgaataatactccattgtctggatgtaccacagtttggttatccattcacctattggatgatattttggcagcttccaactttggacaattatgaataaagctggtgtaaacattgttgtgcagatttttgtatagacagaagatttcagcacatctgggcgaatacctaggaatgtgattactggatcatgtgataagattatgtttagctttataagagactattaagctgtcttctcgagtggctgtaccattttgttttctaccaataaagaatgaggtttcctgttgctccacatcctcaccagcatttggtgttgttggtgttttggattttagccattttagtgggtatgcagtggtatctcattgtttccatttgcaattccttaatgacatatgatgccgagcatcttttcatatgcttatttgccatatgtttatcttctttggtgagatgtccattcagatttttcacgtactttttaattgggttggtgttcctgagttttaagtcttttttttatattttggatactagttctttatcagatatgtgtgttaacaaatactttctccttgttggcgctggtctttcattcccttaatgatatttttcacacagcagaaatttttaattataatgaagtcttatcaagtttttccttcgtaagttgtgcctttggtattgtatctaagaagtcattgccaaatctcaggtcaactagatttttctcctttgttatatctagaaatttttatagctttgtgtttttcattaggtctgtgattcatttggagttcatttttgtgaacgatgttaggtctttgtctagattgatttttgtgtgtgtgttgatgtccatctgtttcagcaccgtttgttgaaaagactccttttctcactgaattgcctttgcacttttgccaaagattagctgattatatttgtgtgggtctatttctgggctttctattttattccagtgacctacttgtctattgtttcaccaactccacactgtcttgttactataactgacattaagttttgaagttggtcagtgtcagtgctccaactgtattttcttcaatattgcattggctgttctgcctttccatgtaaattttaggatcagtttgttgatatccataaacttgctggtattttgactggaattgatatgtagatcaacttgggaagaactgacatcataacartgttgagtcttcctgttcatgaacctgaagtatctcattgtttatttaggtctttgatttcttccatactagctttgaagcttttctcatayagagcttgtacatattttgttagctatatatctaaatatttcatttgtttggtgttaatgtaaatggtgtgtttttaatgtaaaattctawttttttatatagaaaagcaattgcctttgtatattaccttgtatcctgcaaacttgctgtagttattagtttcagttcttctttgttgattctttgggattttctacgtacacatcatattatctgtggagaaagacagttttaattcatcctttccaatctgcatacattttgctgctttttcttaccttactgcgttaacaaggacgtccaatctgattttggctagaagtggtgagaggggacatccttgccttgttcccaactgtagtaggaaagcaactagttccttaacattaagtatcttgttaattgcaggttttttgtagatattttttattaagttgagaaagttcttcctctattcctagtttgctaagagtttttatgggtgttgaatttttccagtgctttttctgcctctatgcatataatcgtatggatttccttctttcacctgtttgaagtgatggattgcttttgtttttgaatttgaaccacctttgcatacctggagtaagttccacttggtcattgtgtgtactcttagtacatttttgaatttatttgctaacgctttgtagaggatttttgtatctatgtccatgagagagattggtctgtagtttctcctttttgtaatgtctttggcttaatgagttagaaattgttctctttgcttctattttgtgaaaggtattgtagagaattggtataatttcttccttaaacgtttggtagaattcatgagtaaacctatctgggcatagtgctttctcttttagaaggttattaatttatgattcaatttctttaatagacgtaggcccactcaaatgatctgtttcttcctgtgtgaattttggtagattatgtctttccagcagttggtccattttatctaagttataacatttttggacattgagttgtttataatgttactttattatccctttaacatccatgaaatcagtagtaatggcccttctttcatttctgtttgtaatttgttcgttctttttttttttttggttagcctccctacaggattaccagttttattgatcttttccaaaaaccagcttttgtactcagagattttctctattatttccccttttaagtatcactgatttctgccctaatttttattaatatttttctgtttacttgtagttcaattcattctcatttttcttgttttctagggtagaagtttagattattgattttattaggttggtgcagaggtaattgccgttttgccattacttttgcaccaacctaatagaactgtcttgttttgtaatacatgcatttaatgctataaatttcctttagcattgattttgctgcagttcacaaattctgataagtagtattttcgttttcatttaattaaaatatttttaaaaattttttgacatttctttgacatgttatttagaaatatgttgttaatgtccagatgttttgggatttttcagctatctttcgtttgatttctagtttaattccaatgtggactgagagcatatattgtataatttctattttcttaagtttaaggggtgttttatggcccagaatgtggtctatgtctatgaatgttctgtgcaagcttcagaagaatgtgcatttttctgttagatggagtagtctatagatgtcaattatatccagctgatagatggtggtgttgtgtttttaactctgtccttactgattttctgcctgctggatctgtcaattactgatagagtggagtcttgacgtctccaagtataatagcggatttgtttctttctctttgcatttctataagtttttgtctaacatattttgacgctgttgttagatacattcacattaaggattgctgtgtctttcttggaaagtttaccatttaatcgtcatgtaatacccttttttatttctgataatcttccttgctttgaagtcagctttgtctgaaattaacatgactactgcagctttttttgtttagcgtttagcgtcatatctctttctccatcccgttacttttaatttagttgtatctatattttatatttaaagtggatttctcatagataacatatagttagatcctgtttttttttttaaaaaaaagatccacactgatagtcttataattgatatgtttggttattaacatctaatgtgataattgatattacttagattaatacctacaaaataagtgttttctattcttgcccttgttctttttttttttgtcttctgctctttttctgctttccgtggctttaattgagcatttaatatgatttcattttctcttctcacaacatattccgttttctcttttctcagcaaatgtacatttaaaaatttattttttagaaggaggataaagcaaggaataaaaacttcttaatgatagccctagagtttgcaatatacatttacaattaatcttaactcacttttaaataacactgtgccacttcagagccagtgcaggtaacttaaaatcagacatttccagttccttcttgttgttctttatagaatcggtatcattcatttcagttatctgtaaactataatcaaccaacatgcctgttacgccttttgtaattatcccattgttcttagatattttgtcttacttttctcctactcttctttctctttgcttttcagtttaggaagtttctgttgacatgtcttcaagatcactgattctttccttgactgtatccattctactaatgagccagtcagaggcgctctttatttttgttacagtgtttgtgaactctagcatttcctttcaattctctcagggattttgtctctgctgacattacccatcttttcttgcatgttgtctactttttccattagagctcttagcatatcaatcatattaattttaaagtcgcagtcagataactgtaaaatatctgccatatccgagtgtgcttcttttgcttgatttctctcctcagcctttcttctttttagagtaccttgtaattttgttgtaagccagacatgatgcattgggtaaaaggaactgaggtaaataggcttttagtgcgagttctcacatttttgtagctttgggtgtcagagggtaaaattttctcttgtgtcttccttgtgttttcctccccttttctcttagattttccctgttgaatccttaaatactgtgtgagccttgaacttctgccgtaattccgtattattttataggaccccttctgatgagaaggcatcgggaaaagggaaacgttctgtaatcctgtgcttagatctctctagtgagcctgtgccacttggctgtgaccttcacagctgtttctcaacttccccgcatcccctccccgcccccggctaccaaattgagacaggaaggtgtgagcgggctggagttgggtatttccatcagttcctgttggtcaggctctggtaaatcccaggtagcctaggctctgctaaatcatttctctgtttgttaaggagagcagaatgctttgggcttctttcacagtggttgctcttctccccttccatgaagcacagagggatttttttttctaattttttcacccttagaacctggtagggctcttagaggtaaaactcagcaaagtacaggagaccccttaagaccgggcccccaggaacttgttgttgtttttgttgttgttgttgttgtttttaatctctcaaattagtttaccactcagtctctggcaattcggcagttacccttgaggcattcctaccggttgctggctccagcaggtatttctgctcctactatgctgtgattctctgtgtttgcctgtctctagatttcggtatggtggtttgccctgtgacctgagttttctaatgaatctatggaagagttgtttgttttctgtttgctcagctttcttcttactgtgagtatggtagtgacaacgtccagaatctctatttgctaaccagaaacccgatacatctctaatctggtattaattttggaaatacggctccctgctttttagaatttgaactgtatctagattttcagcacatatagccatttcctatgatacagtctctcctttagccctcacgtagtcttagttctacaggcacccctatcttttatgcgcattaggagtccttaggacaatgtatctctagttattttgattgtctgaagcttatactctggaatattcctcagaaaggcatcaagagaataatcccagagttttttctgtggatagtacataaaaatttgtgttctttttacatgaaagtcaattttacaggtatagagactcgacagtttcttttctggagtgttgtcgatgtgttactctatttcttctggcataaagcattgtttgaaagtctggtgatacaattttatttcctgtaattttactggagtatgacttggtgtagggcgtaggtcattctggtctgattatttcccaggtatgtagtatgctctttaaagtttgaaaattgtattagtctgttttcatactgctacaaagaacggctcaagatgggtaatttatgaaggaaagaggtttaattgactcaccattcagcatagttggggagacctcaggaaacttacaatcatggcggaagggaaagcaaggtgcctttttcacaaggcagtaggatggagaagtgctgagcgaagggggaagagccccttataaaaccatcagatctcatgagaactcactatcgggggaacagtatgggggaaaccacccccatgattcagttatctccacccggtctctcccttgacatacgaagattatgaggattacagttcaagatgagatttgggtgggaacacagcctaaccatatcagaacttttaaataccttttatttcaagaaagtatttttattgtgatttttagtctatgagctctttccttatgttctttatggttttctggggtctgtatgttgatttttttgcccatctttaatatttgtcacttttgcccagatccctgttcttgcttcatttctttgttttaaaagaaatccctcatgcctataatcccagcactttgggaggccgaggcaggcatatcaggtgaggtcaggagttcgagaccagcctggccaacatggtaaaaccccgtcgctactaaaaatacaagaattagccgggcgtggtggtgggcacctataatcccagctactctggaggctgaggcaggagaatcccttgaacccgagaggcggaggttacagtgagccgagattgccccgctccactccagtctgggcaacagagagagattccatctcaaaaaaaaaaaaaaaaaaaaaargaagaaatccccactttaacttctgtttcttgtaaagtattacgtattgtgtttatttgctcttatatgtctttgaatttagctttcatttctgaaataattttttttgtttctaatttttttcttaagttttgtccctttattgctgaatttttggaaatcagatttatgtttctgttttgtgtcatgtatcattgttgtaatggctttttaccttgttttgaaatagtcaattatagttttgccctgtgttctgggcatctttttggttagtgagttttcatggtcaatgatgttcttctacactttctttttccttttattccataataacgttatgggatttgctcccaatattttttatgttgctcatttttaaatgaaattaattttcctaaactttcagaggaaggcttagttctagatagcttttctaactttacagagctctgtcctctggttgattttatgtagttttcagaaatacagtggcttgctttcagatgacttggttcagtccttctgcccacttttatctggatcttctctatccttggtctctttttctctctctttttaaaagcgttttatttttacttactgctccttgtggagtagggctaccctataggcagtgtgcctctatcattggtctctattatttctgtcttatccagctttgattctaggccctgtcctgcaagggagccctaggtggtcagtttccaggtcacagggcctagacttgtcctaatccatcagaccctactgcaggccctgctgttggaatgggcaaacccttcctaatttcagctgctattctcacagaggtcttctgggctttctggtgaatttgtttagctattcgggggttctcagttgtcaagtttgttagttgccccttgggttctctctgctttcgtcacatgcatgctgatatcatgccaatctttgggttactggtagcttgtcctcatctacttgtattttggagttttttgtggggacactttataacctagttttgttgtaaattgtgtccttgaattttttcttgctgcctagtttctctattttgatgtagggtttcaggattcctaaaatctgccatgctgcctccacgtttcctgcacctacactttttcctccttggtacagtgggaaaaataagcttctcctcaaatgaaggataatgtgtatgtagtatctgatgcagaccaggtactcaaaaaatgatcattgtgatgaacagtttgacaatttcatacttgttgagcagtggcatagtctgttttgaagctgccattgtgggagctctgataagagggggatttaggggtgaagagtctaatgggcctttggggtgaggaaagaacaagagggtgagggtttgtgggtgtcattgatggcagatttgtttgcagtgttgagagaaaggtggagggaatggactggagcaggactgggagaagagacatcacacacagtgaagacgtagcgaggccctggagcagatcagaagaaacacacctaagtttgacttaggggctgattgatgatcaatgtcaatctaggtgactggttataggattggagaaggcaacacttggaggccaggataagggatgacatgtggggagagaatcaaaatccaaggttaaaaataatggttgagctgcctacgagaccaaatcatgttttgccttcgggtaagagcaggtggcacaccatggtcttctaatatttagtgactgttgagggacttagaactcttagagctccaagagtcatgtggcttttgtacagacagcaggtttaggattccagctcctcctgcttgaaaagaaggtttacttttcccagggaaatgtggggccaggttcaggtgagaagtatgggggaaggttgaggcggacgcagagagctgctgctcaagcggagaatggagagtgatagagaaacgtctgacatcagcccctgggaagagggtgccggtgcctcacctgggcggcttgtttaggggtccggggggttgaagatacacccaattttctgaaatgcaaagtgtgcacagttaatactgctcatgtcttaactttggcaaaaaaacaacctgtgtacttaaactccttgtcttttgaacatcataaaatgccatgcagttggcaaattgtggatgcaaccggtggcatatttgtttagccagtaagacagtatcagaattaatcagcttcttgtttggaaacagcttttagggggttctctctgcttactagttctgaaatcacagacaagttacataacctcttgtgtctcatttttctcatctaaaattgagagggaagaagagactactattgccttgtagggttatcgtgagaaataggtgaattgataaagttcttagaactgtgccagtcatgttttaagcatttggtaagcattagctattgttgtttgttattaccttatttttttttaatttttttttttttttttttttgagatggagtctcactctgtcgcccaggcttgggtgcagtggcgcgatctcggctcactgcaaccactgcttcctgggttcaagcaattctcctgcctcagcctccccagtagctgggattacaggcacccaccatcacacttggctaatttttgtatttttagtagagatggggcttcaccatgttggccaggctggtctcgaactcctgacctcaggtgatctgcctgccccggcctcccgaagtgctggaaatacaggcatgagccaccacgccgggactgttctaacatttttgattctagtgaacacatatgtaaagtgctcagcacaacacagtgatgtagtggtcattacataaataatcttttttctctcttttatttgtttcattttaaagatgaggaatttgtgctccagaacaatccagtgatttttctcaggatctcatgggatgacagggcaggtctcacctgctaggaactgtgcgttctttgctttgcttttgtgtcttattttattctagataggaaggaattttccattcaggtttatattatttttattatggttggaattgctgtcataaaggacattccatccaggtgtcaataataattttccagtttgcaaagaagaagctcaagatttagaatctggaaaccttgattgtactctgttctgattctgctggcccgtggaatcttagaatacctttacttctctggcccactgttttcttatctgtaaattgaggagcttaagttgtttgatttctagagttcctttggctccaacattctataaccatgatttctaaaactgcataagttttgtgttacacaaataaaatagtttatgctagaaaaattagtcaatacaaacaagctaaaaagaaaaaagaagagacagaggaggaaggtagttagaaataaaacaaaatggactctggtccttgaaggttttattaaccctaaaaaaattttcaggcacttcccttttaatgggagtttcaaagcaccttagtacttttatggtacaagtctgcctgtcagagttctccagagaaacagaatccataggcaatatatatatggagatttattatggaaattggcccaggtgattatggaggctaagaagtcacatgatgtgctgtctgcaagctggagaacctggacagttggtaatgtaatttagtgcaaggccaaaggctggagagtcataggaggggtgcgtgtcagtgatgcaagtcccagaatctgaaggcccaggaaccaggaactctgatgtctgagggcaggagaagatggatcttcatgaattctcccttcctctgccttcttattctattgaggcgctcaatgaattggttattgctcacctgcattggcaagggtaggtcttctttactcagtcccctgattcaaatgctaatctcttctggaaacaccctcacagaccctggaaaagaacattttaccagctatctgggtatctcgtagcccagtcaagttgacaaataacattcaccatcactttctgtattgtatcctagtgttttatttcatctccttattgcagaggaagctcattgagggcagcagctgcatctcactcatattctatccctgtcccaccaaagaagtacagtggcttgcagagtagctgtagctcaccaagttttgttaataccatccagtgactgcatatcttaggtggcttactatatttttctctttaattctctcaggcatcttcagaaatagtttttctgtgtattttttcctggagcaaaaactgtgtgtttggacaagaatgatgtgggctccataatttaaataccagtgtcttgggtctgtctgtcttctttctccttaatgtcctgatggactcatagactccaattagtgaccagctcatggggggttctcaagataggtgaatttgctgctattatgtgtagaaacaggggccatctttttttttcagttgtcatttatgttcaattgttttgtcattgattgagagaggacttaattgtgattgatagaccctttatctataaatagtagaattcagtcaagtattcaaaatttcaagtgttttgaaaacttactactgaagagtttcagtaaccctgcacactaattagttgtgaaataaggaaaagctttcatcccaccgtgatattttaaaagttttaccttatgaacaaaattcagaagaaagctttttatgattctggtgtgttggtgaatatgatatttttattatttattgatatcaaatattttattgtctgtcttcattttaatacattgtcagaacctgcatacgtaagtagatcagaatctgtgtcctactaccaagggtgaaataacttcagccatgcgacatgggcaggcgttttaagcagcatcacggagatgcagagctcaagttggtcagcattgctgcccggtgctgacatctggccagcttccacattcctgtggagcctctgatgagggttatttaaagctgtggctgtttctagtccaccagggaaccaaaatggaaaagccatttacaccgtgctgtatgttaagatccagttaattctttgtggtctagaactctgggatgatttgcattaacgtggctgtctctgtgcacaactgccgagggttctgtctacagtgcaacttgtrgaatcttgcagaattggaatagtgcagcctgcagtgctaaaacaaggcagactcctttgaatattctagaaggtatggtggttcttccagcatgttacatttgaaaccacaagaggtgtgaaaaagccctggccgggcgcagtggctcatacctgtaatcccagcgctttgggaggctgaggcgggtggatcacgaggtygggagttcgagaccagcttggccgacrtaatgaaaccccgtctctattaaaaatacaaaaattagccagttgtggtggtgcgtgcctgtagtctcagctactcgggaggcygaggcaggagaatcatttgaactcgggaggyggaggttgtagtgagccgagactgtgccactgcactccagcctgygacagtgagactctgtttcaaaacaaacaaaaaagtgatgaatcctttgcagatagcaaaggcctttttagtggctttcattcggaatgcacagtctgtgagctgaactggtgattgcagtctagtttttatgaccaacgttacagaacctttcatttagagtccaagatggccaatgctcacccatgagaagatcttagaaacttccaagttccatatcattttgtgtgttttcaggcctcatttcccgtgtctcatcctggctttgttcgccctcatctgtctggatgtaagtgccattctgtgacactagaactttttcccatctctgaagtgctactaaaggaatcatttgcttcctaatttgccagattgaaaactatggagacaagttccagagttccacatctttgtgataagttgggccaccttgggaacgagtctgtaatgtcatcttacagggctgtggattttatcctgcttattttgccttccttatattgtctactttatcctgaagaagaggaaaaagcgggacctatttcaaatactgatacctgcttccatgagttatctagacataatgattctttctctaggagttttagtttttcgatttttctttttttttttttttttggttttttgagacggagtctcgctctgtcgcccaggctggagtgcagtggtgtgatgtcggtcactgcaacctccgcctcctggtttcaagcaattcttctgcctcagcctcccaagtagctgggactacaggtatgcaccaccatgcccgactaattttttgtacttcggtagagatgggatttcactatgtcctgaaatcctgaactcctgagctcaggcagtctgcccacctcggcctccgaaagtgctgggattacaggcatgagccaccacacctgcccagtttttttattttttatttttattttttttgacaggtggctcacgcctgtaatcacagcactttgggaggccaagtcaggtgaatcacctgaggtcaggagttcgagaccagcctggccaacatggtgaaaccctgtctctactaaacatagaaaaattagctgggtatggtggtgcatgcttgtaaccccagctactcaggaggctgtggcacgagaattgcttgaaactgggaggtggaggttacagtgagccaagatcatgccactgcactccagctagttctttgatttttctgaatttactccattaaaatactgaccactccttccatgttatatcctgtattagtatgttctcacactgctataaagaactacttgaggctgggtagtttctgaagaaaagaggtttaattggctcacagttccacaggctgtacctggaagcatggctgggaggcttcagaaaacttataatcatggtggaaggcgaaggggaagaaatcacgtcttcgtgatgggagcaggagaaagagagaacaaatagggaggtgctaacacactttcaaacaaccagatctggtgagaactcactcaccatcatgagaaaagcaagggggaatccacccccatgatccagtcacttcccaccaggtccctccctcaacacaaacgattacaattcaacatgaaatttaggaggggacacagagccagaccctatcatatgccttccctgtttttcatctctgtgctcagataagcctgggattgactccatcacccrtgagttgtgtaggtcccctgggtgcatggtgtactctctaccctaaagcatttctcagtttgtcatcctacgataagtaacatctctttctgaactgccattgtctttctaaatccacctctcagtgtccatgattcttatacctagcgtgttaggtggttggtccatattctctgttccgtaagttgtgtggtcgtgtagcttatcctccaaaccaggacattttttagagggacagctggtataatccaagaccattccaggctaatcaggatgtgtggtcgatgctgcctctaagagaatctccaaggtagagacggccggcgctctgagtgtgatcagtaaatatccagtcaataagtgcctgcgtgagtccttgattgtctttcttttgaaattattgaaccaactagttccttttgagcattttcctgctgattcccttcctggctcaagaataaaaaaatcataaatcacagggacagtgccagcaacctcaccctgcccccacaccccacaaatgcttccctcccattgattttgcttccctctgttcattttggccagatccaacgttcacctaaataacattcctaaagaggctagagtagaatgataaccaaggcactgtagtatttaactgtgcacgtcaacacgttttcttagttactgagttgaattttgaaatgtattctactctgaaaatgcccgggcaaagcatagttgaatattgctttaggaattttaataacagtttgttctcactgctttgggggagctcattctgaatggtgtctggttagcaggagcattagaagatgttatcaacacagcagaaaatctaccaggtgtgattacggtcagcaaggcaccagtagcgggtcagtggtacagcctgctcccattttcccgacacgttcaacgggggcagcttttgtacttttaaataacccattctatttcggtagaccttttctcccttcttttctaacagctcagtttccatacaagactcacagtgaactcaccattcccgagtggaaaggagtgactggttgtataaataygtctgtctccacttggtctttgcctgwccgggctttgtgggggtctgttgattctttcagcttcactgccttccctgcagacccgacctggagtcctttgttgccctaaatatttttctcaaagatcttttattaactttttcttttctgctcttgkttttcttcctcttacctactttaccatgtggtcctgtggcaagagtgagaaagaaaaatacattctagtggtgygatcrgstgaagcaacgactgaatttctcttctccattaaagaaaaagaaaagaaaacacaacttttaaacttytttagtttctctcctgctaagtgtttgttgaaaggacacaatgaaatgactgaaaagaaccagttttccctcattaaatctgtcctcgtgaacctgagcttgtgaactttgcacttttttgagaagagcaacatttttttttccttgctaattagttgcttgtgctattttcggagaaattaagggaagatgggagtaccttcagttttcttttgacttcagtgactctcagatggatggtctgcaggtgtgagacactgctaattgtctgccagttgcagctcacccatctttcttggtaataaaacccctaatttttagctggcacgtggtcacccagaagccagccttgtagctaggcatcactgtgttactgaattttgattaattgcttgtaagtggaaataccttgtacaacttcttggaagtgtcctgaaggaggaagccttctttatcctttcctttttcctgagaggaatgtagatgtgatggctgagctcaggctgtcgtcttggatcttgaggtgtgttttagtcagctctggccgttataacaaaaatactatagactgggttacttaaacaacagaagttttttattcgtggttttgaagcctggaaaatgcaagatcaaggtactgacggatgcattgtgtccggtgagggctgtcttactgatttgtggaaggccaccttcttgtatcctcacccagtggagaaagagatcgtgtctcacatgtctcctcttatgaaggcacttaacctcattcatgagggctccaccctcatgacctaatcacctcccaaaggccccgcctcccaataccatacactggggattcgggcttccgtatatgaattttttggggaaaacgttcaaatrtgtagtccctagcaaggtgggagccatgcataggggatggcttggtaacgggaaaccaggggcctctggactgcctatgagagaaactcctgttttgtgtaactcctgttgagtgtggtttgctcttacatgaagctgagcatagtcttaactgatacatctatgaatctatttaataatcttgtttgttatcagggatttctggggagatttttttcatgtcagactatacatctcagggatagagcaatgctttgtctggtggacagaaaaatctgaactcaaagaaataaaaatgtgtgagatttctgcagcgtataaaatcttaaccatgatgtgggaaaccactatcaggattctgtttaaaagccacaaaaatgcttttcttcttccccttagcctctttctgtgccattctgtaacaattcagtcctaaagccattaactgggtgtattagtttgttttcacactgctaataaagacataccaagactgtgtaatttataaagagagaggtttaatggactcacatttccacatggctggagaggcctcacagtgatggcaggagatgaaggaagagcaaagggacatcttacatgggggcaggtaagagagcgtgtgcaggggaactcccatttatataaccatcacatcctgtgagacttatttactgtcacacgaacagtatggggaaaccactccccatgattcagttatctccatctggccccgcccttgacatgtggggattattaaaattcaaggtgagatttgggcgaggacgcagcctaaccatatcagtgggacaggaaaacagaggcgttcaggggtggcctgcgggggagcattggcgccttggtgaagggagcagccgtgcgggttgggcaagtcggggcccaggcagagtgaggagggcgtcctggtggaggtggcctggcatggagtttagtatcagggcagagtgaggaggaaggggtgatggggagattggttgctctacatagtggaacacgtgttggataattgaaagggctcgcaagattccacagcacctgctcacgtgaagacttaataaaagcacaggaggtggttcagctgtaggaagaaagcacaagccagcatcagtgacccaagagactcactgttgtggctccaaagggcacattttgtctccagattatgaaccatcaacacgtgtccaaggaatcttggtgtcaggagagcctgggcagaaacatcaagcactgtcttctgtgcttggccagtcaccaagccaacccaggccctgtgtccaggtgtaaggcatcgatccgatccgcacctccctgaatgttcaagcargctggctctggggaccaccaggggcgtttttaactttaagctggcccactcctccttatcttgattaagaatcagtaccaaacttccaggtgtccttgcagatgagcacagagctgtcccggtttcactgtaagataaccattttatgtagctctatataggggcatttattaaataagtaaacggtttaaaggccaacgaagcggagttctcgtcgttagaggagagaattacaaatacgggaagggagaaaactagaatgagccctgagatgtattggaattgggtagattggggtgaacgtagggtgtttaaaaatagaagtagacagtgaaatcagtacaggtgttaggagtgtgttattccctagctctgaccactgagaggggccgagggtacctgactcccccccaccccaaagtaatgagcacatctagtgcctgaattttggcttataaatattatttcccacaaaaaggaaccagagatcatgggataaatggctgattccaggactgtggcagaaaaaatacaagatgaacctgaatatcttgtgtcagaaggcaagaaagtgctgcaagaatgagggcgtgtgtcgaaaggactaataagccagcttggatggactcatactggccaaatcaggggcaatttaaccatcactgtaaataataatgatagattataacccgtcagctaaaatagcaagctgcaaagccatgcaagtataactaaataaaccatgatctcccagcaccaatgctcttgaccttttggagtggacgattctttgtcatgggttcggctgccttgcgtgatgtaggatgtgtgtcagcatccctggcttccacccactacaccagtgctttacactagtgccatccagcagacagagaatgccagtcaccaacgaaattttagattttctagtggccacagttgttacaatccaaaatgtctccagacattgtcagatatcccaattgtggggggtggggaagttgccttgatcggggaccaaaagacacaataagtttagagtttggtgaggaacaggatattgacattgtgtcaaagtacccgtcctccttttcccaaatttactaattacaagaggggaaaacaagacattgacaatggagaggccaggcagacttacgcgatcaaagtgaagatccttatcaatgggataaatggaagtcgtgtgtcctaggtagggtgccatgacaagagcacagtgtttctgcgatatccctgccaaagatgctgatatggtttggatccgtgtccccaccaaacgtcatgtggaattgtaatccccagtgttggaggtggggcctggtgggaggtgactggatcacgggggcaaagttctcataaatgggttagcaccatccctcctgtattagggttctctagagggaaagaactaatattatatatatatatatgtatatatgtgtatatatatatgtatatatgtatatatgtgtatatatatatgtatatatgtatatatgtgtatatatatatatgtatatatgtatatatatatagaaagatagagagagagtgaatgagtttattaagtagtattaactcacactaccacaaggtcctgcaataggccatctgcaagctgaggagcaatgaaagccagtccaagttccaaaggtgaagaacttggagtccaacattcgagggcagcgagcatccagcacaggagaaagatgtaggctgggagactaagccagtttagcctttttctacctgctttatatcctggccatgctggcagctgattagatggtgcccacccaaaattaagggtgggtctgcctttcccagcccactgactcaaatgttaatctcctttggcaacaccctcacaggaacacctaggatcaatacttagcatctttcaatccaatcaagttgacactcagtattaaccatcacaccacctttgtactgtatagtgatagagttctcatgagatctagttgtttaagagtgtgtggtacctcctcccaaagccccacttcctcctgccctggccatgtgatatggtttggctgtgtccccatccaaatctcatcttgaattatagctcccataattcctacatgtcgtgggacggacctggtaggtaactgtatcatgggggtggggctttcccatgctgttcttgttatagtgaataagtctcacgagatcgaatggttttatgaaggggagttcccctgcatacgctctcttacttgctgccatgtaagatgtgcctttgcttcctctttgccttctgccatgattgtgaggcttcccagccatatggaactgtgagtccattaaacctctttcctttataaattatgcagtctcagtttcgggtatgtctttactagcagcgtgagaacaggctaataccccatgtgaagatgcctgctccagctttgccttccaccataagttccctgaggtctccccagaatcagatgcttctgtgcttcctgtacagcctgcagaaccataagccatataaacttcttttcttataaattactcagtctcaggtgtttctttatagcaatgccagaatggactaataccgatgaatgaatcaagaatcaacaaatgacaaatctccagcctgggcaacagaatgagaacccatttctaaaaacaaaacaaaataaaacaaaaaaacatttaaatcaagcaagaatggtgctgtgagcctgtggtctcagttgcttgggagtctgaggtggggggattgcttgagcctgggatgctgaggctgcaatgagctgtaattgcactactgcaccccagcctgggcaacagagcaaggtcatgttaaaaaaaaaaaaaattgtacatagagggacataatacaaaacaattgcccctgcaatcttcacaattgccaaggtcacgaaagtcaaggaaagagaaattctcagcttagaggagacgacaaagacctgacagctacctgcagcgtgaattctcaaccagatcctatttcttccctaaaataaatgattgggacatttggagaaacttgaatgggggctaggattagatggtcctcatgtactgggttaactgttttaatggttgtattgtggttatgtccatttttgcttgtaggagatataccatagactttatggggcatcaggccagcagcttaatctcagtggttcaagctgggaaaacaggtttttgtattgcattttgaacttctctataagtttgcaatggtttgaaaaaacaaaaaacaaaacaaaaaaaaaaacatgcggccggactcggtggcccacgcctgtaatcctagcactttgggaggccaaggtgggaggatcatgaagtcaagagatggataccatcctggctaacatggtgaaaccccatctgtactaaaaatacacaaattagctgggcgtggtggcacgcacctgtagtcctagctactgtggaggctgaggcaggagaatcgcttgaacttgggaggcggaaattgcagtgagctgagattgcgtggctgtattccaaactggtgacagagtgagactcagtctcaaaaaaaaaagcaaaagttgtggtcagtagaagtgatgcatattttcttcaaagcgtgctgagccccaacatcgagacccttcctgagaaaaatttttatcttatccgtttaaggaaaaacctctactgcattaacagaatgttcttaaagaaataatattggaggctggacacagtggctgatgcctgtaatcccagcactttgggaggctaaggtgggagaattacttgagcccaggagtttgagaccaccctgggcaaaataacgagaaccacatctctacaaaaaatacaaaattagccgggcatggtggcatgcacctgtgatctcagctacacgggaggctgaggcaggagaatcatttgaacctgggaggcggaggttacagtgagctgacattgtgccactgtactccaacctgggcaacagattgagaccctgtctcaaaaaaaaaaaaaaataggaaaaatttacacatacacacacacacgtgtatatgcatatgtgtgtaaatgctgacacatacagtaaagttttagaccccagagtagaggggagatcatttctctcttttacttttgtggctctgtatatattttctttatttatagttagaaaaaccattctttaagcaaacctaatcttactgagcagattaaaccaccatgataatgtttgaagccagagagcaatctgcatttcaaatcagtgctttgaaatgtcaaccaaaatatgtttagaagaaattgtgaagggtttcaactctgatcatctgataccatggaggagaatttctggatgggcacggaacatagctgaagcaataacactggcggccttctgctagataaagtttctgtttggatgaagtggcttcaaaaataataataattaaaattttttagcacaaggtaaggcccctgtgcacctctgcccccttggctggtctttctgactggcacagataattgaaatggatcactaatggctgggcaagcaggtcggggcgccacgcagagctaactggccctcgtcatgttggattctgtgacattaatctgattagctctaacttgctgagctaattgcaccgttagttgcatgccttttcttcctttggtttaacattgaataratcgtgttacatgaatcctagcttctattttggtgagcgatagtgcttcaacctgtgaaaataactttgccgtttgctttgtaggagtacaggtagaatccggatacagtgatacatttactgactgacctttttttttttcttttctttttagttaccttatcccatatcacacaactggtcctcagccataacaagctaacaagtaagtgatgtttctcatttgttacagtttctgacatttaggtaatcctatggcactgctgagtctgttactgtttccttgggagaaactaatgaagaatgattatttgcagaaaccttagtttactttggtgacactaagatgagaatattgtcatcctgtattttgtccttttgtagttagctctactttgaagattcttttcttttttttgagacarggtcttgccgtgttacccaggttggtcttgaactcctgggctcaagcgatcgtcctgccttggcctcccaaagggctgggattacaggcatgamccgtggcgcctggcctgaagattctttcttatcatgtttataaaccaaagagaaaaaaaatkacattgttgctctggaagtggttccattcagagatagtaaatgctatgctgacytgaattgccagaccattggtgagcatttcatgagcaaaacttacttgaaagcattgaaaacttgaaattgttagaacaagttctttgttttcatttatatttcctcctcraaagggaaagttttaactgttyaatacactttctgtccctgcttgatggaggaaaagatgcaaaattgtatacatgatatacctttacatctgcatttttcaaatttttgagtctggcttccccaaaagaaaaattctgctgggtatccatagagccccacagtagacgtatctgcttagcatagatgaatgcctatttttatatgactatcttgtgtgcatgatgggccrttttcttcgtagagctgtggctttaaagattttaatgacagggacccacgctcctttcccattcctaatgactcagttctttttgcttgccatttttcttgcagacttgaatgattttctaatcatgtggcaagaatttgtgaaggagctttccgagtccagtgaaattgagcagaatgtcatgttgagggatttgtgtcatgaatttatgtgtgtatgtgcattatatacagcttgaagcgatgtcacagagctgttgattattgagaattaagagtggcagcagggtcccctcatgtgcaagaaacaagtggattagtcgttgttagccaaagcgtatatttgtaaggcaaaggcagagtgacggcacagttgtcacacttaagtagtggtggccacagaagccaaaagtgagacctacaagtcatgtgtggtcattgttgtaacaggtaatttattgccggttccattgtttttctgggaaatggtcccgtggtccacagagaccagattctcagttcagaagggattcatggtctgttttgaagcgtggaccacgtgattcctaaatcccccaagatttgtgagcagtaataactgacatgttctgttgtgtagtttagtaaagtatttcttaattgctaagcttaccattgttacaacaatgataccttgttttgcttatcttgtgcaaaccagtttacacaagaaagcaaaactggccaggatcagtgaccgatgcctgtaatcccagcacttaggaaggctgaggtaggaggattgcttgagcctaggagtttgagaccagccaaggcagcatactgaggcccccatctctaccaaaaatcaaaaaattaaccggacatagtgggtccagcacctgtggtcccagctactgaagaggctgagcccagtaggtcgaggttgcagtgagccatgatgacgaccctgctctgcagcctggacgacagaggtagaccctgtctccaacaggaagaaagcaaaacctttatttctattatatcattcattgatctcttctttaaaaacatctttcagatcactgtagtttatttctttttacatcttcacaaagatagaaatctcaggagtcaatggatcagtttcttcctccaggcattataatattaggttaatttagaggagcatatttatatgtggagttacattgtgttggccattcaggagactgactgtgaaagaatccaaactttatatttctgccttgccagtttttttttccttttcttcactccatttgagacactcttgacctaatccagtaaactctaattaatagtcttggtaaattctgtttcaagccatcctgagtagcgtcactgacacccgatctgtttcagtaaggtcaaattagcatcctttactatttttctggcatttaaatgaatgactttgctatggtttttcaagtgtttatagtaaatatgtccatttgatggaaatataaatatgcattaagtgtaagtggctaggcacaccctgctgtcactttttatggtaatcagtgtctttcactttctgttgtttttaatagggaccagctgacaacgccacattaaaaccacagggactcaaaagataactcccccaccccctcacccggcactgcttttatcttgcaaaagtattcatgtttttctcttagtatgccaattacaccgttctctgacatttccacttatgtactcatggaaggaatgaatggtttactcaaactgggacattgatttggggacactgttgactccactgacttaagatctacagggttattgaaacagtgtggcacgtggttgacttgccttttcttgccagtggttttggccttgacatgtctacccagggcagtaaaagtgaggcgacraggaagctgaaagtgggatctgtgattctgaaattcctcaagaatctgggagcagaaattcctgaacttttaaatactgcagttcataaaaatattaatgtattgtcaagctaattgctgttaatgctccaagactattatggtgcccctatttgaatttaaacctgggagcttggggyagcgttgatgggtttttgaagtcagcgggggacttaatctgtctgtagcaactttcctagatatgtatatatgcatgatgtgtttaaggagacgggaagaatagttgcaagtgaatttttttcttctgcctttttgctatgaatgggcaggtactractttgaatgcaacaaagtcattggcaaagtcagaatgcaaagccatcctggcccartgggaagagtttcagattgaagatcctttcggaaataatgctttctttgagcacctgcctgtgatgcagtacgcacctggcagaaggctggcttactctcatgcactcactgcccctctctgcctttcagaaactgccctaatctgccccacatcccatgccagcctctcctctccatttgctgctctaggaagatggatcatcttctgtccccccgtagccctgcctctgggcccaggatctactcttgcctgcctctcctcctccctcctcctctctaccagcctctccccatcctcccctgggggccccctggctggtctggcccatctgaagcctttcctccccaaactctcttgcatgtagactctttaactctagcatggcattccctgtccttctcttcctttgtgttttttttctctctccaaatagatggtcagcttttgtggaagcatggatcatttcatattcttcctgaatgcctgtgactgggcccttagtggcttcgcagtaattacctgtataaaccgagtgttcattgctcccaggaggtatgtgaatgacagggaagggcagagaggaaactgctggctggagagaaagtggggaacattgggatcagatggtttctttgggattaactggtatagggacttgagtagatgtggctgccacagacttctgtttcttactcgttgtgtgctcatttcaaacatggtagagcgtgatgcyctaaagatacatgaccttcagcctgggcaacatagcaagaccccatctcttaaaaaaaacatgagccaggcatctcagctactgtggaggctgtartgtgaggatcacttcaacccaggagtttgaggctgcagtgagctgtgattgtactactgcactccagcctgggtgacagggcaagaccctatctcaaaaaaaaaaaaaaaaaaaaggtatatgaccttatgtccaataaatgatggccatctcatctttacaatcatagagccaaggaatgatgggctgtgatgtgttactcaggcacacaaaggactcgcagccagggaaactgttttcatgaccgctcagatgcgtgggaaggcagcaataatgccgaaggtcatcttcctgtgtttctttgcttttccttcctgcccctggcctctgtggttaccctccctttcaagccactgtcagctgagtcttttttagtctgctccttaatccaatccctaggttttatggtgttttggaagtgtgagctttgtaaatgctttcctacttgttttttgtttttaaaaaggagtttcttttggggacaaccattttaagacttgtccactagaggtcactgttgagacacatatgtctcctccaggttttgtacctaaagattagaaaccacctttgttgtgagaataaattttgtgcaggctctccggccctgcaccacagggcatgttgctattgctgcttacacagtgcagtttttaccacatttaaggtaaatccttatagaaggaggtatgctgtgttttttgttctcctaccatgaaaatattcagtttcacgtatcattttttagtgtttattatggctactttctcaaattagaaacatttctcttcctccaatatccttacgttgaaagaattatactgctttccatagtattttgtattgggcatatttgagtttttttttttaatctgtggaagaaagtttgaagtatttatgtaaccagattttaattcaaaaataactgtaaaaatcaggaaaatgygtattttgtgcatatttatgctgattcgtatactgctcaattccattgtgttggggagaatatgaaatgaatgtacaacaggaaatgaattgcattctgtagcagtgataaaacaagctctgggcattacgtttttaagtgaagttttccttaagttttaaaaaaattttattccaacagcaaaacccacacgtaaacattgcaagctactactgcactccagcctgggtgacagggcaagaccctatctcaaaaaaaaaattaaaaaaaaataaaaatatgaccttatgtccagtaaatgatggccatctcatctttacaatcatagagccaaggaatgatgggcttaaatacggcagtagtttttttttttttttttwaattttgtgacccatgtgtgttgaggattagacattcgtcattttgtgcaagaaataaccaaggatatctttttgctctgtgcaaacattgaggagccgacatttatgtaaaacttttcaaaagtgtgggtctctgaatgtaattgtttagttttatacttttaactgccatgtaaaaccttttcctgaggtaytggcagttttgcctacaatttcaggtcttcactgtgaccatatctcatcatttaatgcatcggaaatggccaggcaggtagtaaacctaagttttatggcaaaatgtgggttttttttttttaatatacactatttcctattagttacagcttatgtatgaatttagaattataacaaacaagaaatactaagataccttctttggtggtttcaataatttatttatcaaagataatattctaagtacatagaatttaatacttttaaattttatgcagatgtatacattgattatctaccataagwcatattataaacaaattaagcagcatatttcacatgaaaatactgcattcttaaaatttgtagatccaattataatgaagaaaatttagcagtttttaaaaagcataatacattgaaacctttttatgcagacataatagattgctgggatgattgagaagaattaactgtctgaattcctgaggacgaccttcaccactcttctcagaccttgctgttcttaagtctgtagttattccctccttcatagattatttgtcatgctttatgcaaaagttcttgtgcatggcttgtatgaaattaaaccatgaggggggaatatgtaaaataaatggtctctgtgtcatgaatttatcttgtgacaatatcaaaacaacttgctgttcgcattttaacagagtgtaaatgtgtttataatacagaggctttgatcaataacttatttttttaaattactgcacatttatcagtttgcttctctgccatcattaaaagatgagagttaaaaaaatatgcatagtatctttgagtctaacagctattaattaaacaatatctatctgatggtaccggtagtcaggttaccataaaaaagcactggcagttgggcatgtgttgcgattttttggctgtagtgagtgagcacctgagatcatgctatgggagggtctgttgacccaggaacccagaaccagtgcagccaaggccagcgaatgaagtcgaagacgtgtcctgccggtggcatctaatctgtcctcagcttgtagactgtggccaccccccacccccattccttttgttgtcagccccaccaaccaaaatgtacctgttctagaatcctttttctagaggtcctgttttgtgctaagcggaagccagctaacgtgctaattcctccacaatatatttttaaatggaaccaccccaatcgtgagaacttcagaacggtggcaggctgtggagaaaataagacgggggagtgtaagcctgtcactttccaactcataattagcccatgtgcggggctgatcctgaaaaaggtttctattgctattgatgatagaatgtctatcaaacagaattgatttaatagcaaaatattatacgtacattttcagttgatgccctctctcctatatcacttgatgtgtgtgtacatgtgagtatgtgtgcagaatgatagaggagatacactaagaggtgcaatacttaggtacatacattcttgtagagcatctcttctctttttttatgtttttattttttagagatagtgtttttatcacccaggttggagtacagtggcacaatcctagctcactgtaacctgaaactcctgggctcaagcaagcctcctagatagatgtgcaccaccacgcctggctaatttgcccaggctggactcaaactcctgggctcaagtggtcctcctgccttggcctccaaaagtaccagaaatacaggccactgtgagcccctgtgcccagccttcttaacttttcttaagtcactgatctttttaaataatagagtgaaaactacaaccctgatctgtagagaagtgcacgtgatggttgtaattccagcagaggcttgtggatcccattgtgttcatccatgaattctttagaggtccatgcagctcagatttagaaactccagaatcggatgaagataacactagtatgtttgcatgcagtgtggacatagggatgctatttttttgtttgtttgtttgagacaggatctcactctgtcacccaggttggaatgcggtggcgtgatttcggctcactgcaacctccatctcccgagttcaagcgattcttctgcctcagcctccctagtagctgggactacaggtgtgcactgccatgcccagctagtttttgtttttagtagagacgggtttcaccatgttggccaggctggtcttgaactcctggcctcaagcaatctgcttgcctcggcctagtgatgctatttcttaaaggagatgctccttggagatttgtataaaactttagatgatttttaatgcatcacagaactcattcttgatgactttttaaaaaatattgataagtgccatcttattaatctgcttaaatttacattttgttaaataagaatttgcaatcctgtagctcccagggttgaacagaacgtgtgtgggcatatgggcatatgcagttttttttttttttaacggaatacctttcccatttccatttttctttctgttcatcagtcagcctcatagaccaaaaccactcagatacaattgataaccagtaacaaactcattgaccttgcgttttgctgttttcagtctgaaccctcttttgtctaattttttgctggttctttagcttttttcccctgcctatctattctttgttctagtcacctgatttttttaaaaaaactgatgttcctacccctttctctgaatttggcttatycttcagaaagttgagatgaatgctcatcttyctctgtgaagccctccttttcatccaactgaaccagcactgtgtggaaagaaatacaaggcaccccacagcctgtgggaccatcaagaacaacacctatataataacttcagcaggaagtgaaagagaaaagagtgaatttgttgaacccccactctgtattacgtggaggaggcaggtgtaaagtgattaagtgaccagaatgaggaggcgacagagctttctgtacagcttccaagtggctgctccgccgtgtcccctgctgcctctgcaagtgatctgtgtgtgcacttgacgtcccgttaggtcagtgtaggagctccatggacgaagcgttcctgtggctctggatccttactccttccagtcgaagaacgggagaattcctaaggttaaaagccatagttgggttatttcgaagggaatgatcaaagctcccatgtggatttggtggattttcctagccctgggcctcttccttttcctccccttcctgccctcctcatgcagtgaccctaaacataaggtctggtaggaagagaagcagtccacttgtggcctcttgatggatttgatggattaattccttttctttttttttttctttttttttgagacagggtctcamgttgttgcccaggttggagtgcagtgatgcaatctcagctcactgcagccttaacctccaggctcaagtgatcttcccacctcagcctccggagtagctaggactgcaggcatgcaccaccatgcaaagctaatttttttgtagaggtggggtttcgccctgttgcccaggctggtctgaaactcctgggctccagcaatccacccacctcggcctctcaaagtgctgggattacaggtgtgagccactgctcccagcctagattaattcttaattgtgaaagaagacagaaactaatgacaaaacgtgctttttctgtgtgcatgtaaaagagtgcaagatagaatgtgacttgctgactatctaccttgtaatgttaataatcgaggcttatgtgtagatatacatccatatatattatacatagtaaaggcatgtactcatataaaagagcctagatcagtccttttataacactgagactgcttttttccattgatggattgaagtttttttttcytgktttttttttttttttttttcatattctactcctctctctttccagtgttttggaattttctaggcatttttcctacccttccttttcttacccttcgctggatgtcacttcctccccaggccactgaatgccatttcctttcctctcagtgctgcctctccctcccagctccccaattaaagctctttattgatgtatggctttgctggaggggtcgcacatcagaattgtagtgcaatttagaagtggtgttcctgcaaratttcagagttcatacgtcctcctgaagatgctttgggagttaacacaagattcaggcattaactaatttttatatcctcagaggagaagaaatccatacttgtcagctttttaggaaatttgtttggttatgcatacatactttttatagctcaggaacatacatttttgcatgtttggctttatcctctaaaatcgaccttatcacttgcttatgccttttttcctctaattttcacgtaattgatttttcacattgctggtgaaagagtagggccattgttttgcggtgagttaagccaggggatatttttgtttactaaaatgacttaggctatagaatcctgaggcagctcatgatagcatagagtgagcgtgtgcttttggggcacaggtccccagtaatacttgttgtttattaaccaaaagtacattaccattgttatttataaagctaataattggaggatgttggcctttcttggcgtagatgcttagatactttgctattttatgtttaccttgaggaacatgtagaaccttttaaatgagaatttgctttactgtttcataaactttatgtttttaaataacctggaactaccgtaattcactgctttaatagctgctttggggtaaatcccataaaatctgtgaagacagttatcattagtatacttttgaacatcagagtcttgtggtaatatgtaattagttcattattgtccaccttgtgtttttggccagaaaacaaaggtaattaatcactataactacaaatgacctttttttttggcatataaagtgctgaagaatgtaattattcctacgcgagagtgagaagattcttctttatgtataatcattaaaatgacattgagaactatgatttgctgaaagaatcggcatgtatgtaattagtctagacaccacctctgtgctatgaatggactcatgttctccagttattacagctagagattaaaaaggctgtgcttttactttgaccatggatgccccatgtcatatttcatctagtttctgctaatttgattttttcctcccttacttcattcaggccaaagggggacacttgtttttcactatcatattcatcaaatgctggggcaaggaaatgtttgctttcaccattttctcataaatggtccatccctcccctcccgtatatataatgaagagcctcactcattttcacctattctcatgtttttagtaatttttctagtgacttggttgtagtaatgtaacatactaagttatctaaataacaagctaattttaatatcctctgccatcctctgtccttctatgctttataaaaaaagctgcagaaatatatgacattgtgaacatctgcccaggcattttcatttgttatgacaacagacaaaaacttcctttttttttttttttttttttttaaatagcaatatgtcaggtttttagaagcaatactactcagtttcattttgctgtgactcattctatgtagtttctttggggactctttggcccaaggattggtggcacttttgcttcctggaaatgggcacgagacagtagcgttgcctccattgcagcacaagggcggacatgccgcgatgccacctgctgtcctggccctggctgtgagcagttgcctcccacgaagtacctgccttaagtcctcctcttcatccccttgctgtaattcacaatccatcactggaggcagaggttgagctatcagttcacttgtttcaaagaggctgggtcccctggctttcatgccctgggccagccctagctcaggaatcaccagctctgaaaacatcctttggtgcttctgcaaaaacagttgggtgtagtgcagcccccaactccccagaagtttggtggagatggtgggtggaggtcacctccagatttcatgcctgtgctgcggagggaaagcgccatgtgtttggagcagcttctggcttcctggcagccgtgggtgtgtgttagcatggtgcagggtctagtgctgcccttctggagctgaagaggacctggctgtcggtggtaaccatatggctctaaagaccaaagtgtgaccccctgaccctcccgtgggctgcacccaggcagagctcctgtccttatgttttttgcgtggtgcctgctgctcccagagtctgtcgctccttacggctttgatttttttttgcctcaagggccccaagatgcttttgctcaaaaagcccccaaatcagctgcacccaagccgatctgtctgtaccgtcactaccacccagcatcctgccattagggttcagtgttttgaagccaagcagtagagcaggtgacatctctttgtatgactacccttggtcatgatgaatttgccactgagtgacttaattcagtgtgctagggaattcaaggcttttctcctctggaaagttgtccgtcttaagcaacagtgatcttaccataaaatgctgtatggggaagcagaagttgactagaaagggtttgattgtagcatccacgttgaacgtgttaagctacctagagtatcatttgtttcacgtgtcatcagttccccaggctcaagaggcatctttatttggatcagattgattattatactcatcgcattatcgcatggggtaagggacatatgtgttggattgataatcgtgatgctgccaatgaattaaaagttttctgagccaaaagagggttcccagaccagcaacatcggcatcccctgggaagttgttggaaattcagagtctcaggctttaccctaaacctgctaaatcagaaactccgggatacccctccatctgtgttttagcaagccatctggtgattctgacgtctctgtggtttgagacccactgccatcgggtagggctgtgtaataaaacattttgcggtgatggaaacggtcagtatccctgccatgcagtagtggagccactggtcaccacatgtggctgtcaagctcttgaaatggggctgctgtgaccaacaatagcattcatcattttatttaattttgattaatctagatttaaattcaaacagctgcatataactagtggctgtccaacagaaagcccagcccaraacataccctgctaattattattgtataaactcctaaaatgctttgagttgttggttgtggaattattaattttagatcatagaacagaatcttccttactctattcaacagaattgaaactgygattgttacaacaggtgattttgattcttcctatggaggggagacagtttgtgggctgctgaccagttgggggaagcctattcttgagctgattgattgttgattttgtgaatgtgcatcagtggtgcastaccggctggcacatgcctgttgcaggtattaccgatggccgtagatacatgtccttttaggagtaaagctgttgctcaggaaggggctgtgtcagtatttcacgcagatggactttggtttctccagcctgtccagcaaagtggaggtgcttctggccaaagagaagttaatgaacycttcaggcactttgggctgcttgtggaaccttccagaaactgctgggggagatgggagtgctgaattgccaagtctgggctggcacgtcagatggacaaaactcttgaatcacattcagttcttcagtttaggaggacctgaaggaaagaaggtcatgccgggtgtgttaggcggaactgctgctgcaaagtccagaagaaactttgagatttgtctctggggtgatgtgaccacatccttgtcacctttccaaaacagcagaggctctgggatgagagcgtccccagcagtcctgtgatcctgtggctagagcgaaatgggacattgaggagccaggggatatctgagtcctctgggactgttcccgcaaacctagcaactgaagtctcaaaattaaagcagccatctttggctaggcagaaaatgatactcaattctctgtcagaagcgaagttctacatgactaagcttcctaattgagagccccatttgttgaattatttaaagccatatcattgattttcataatccatctccttttagaatcctagaatgttaaaatgaggtggaagagaccttggaaatggtcataatccagccttcttattttacagaggcccagagaggttatgagttgagtgagggcacacacagcactgtagggtcagggaccacgttgctctttagttcctttggtgtcataggtcagctggggtcatagatcagaagctggacagattgatgaaaaaggatcgtttcaaagatgtaagaaatatactgatgtgcactgttagcttttaaaatgcttcttgctcatgcatcctgtagatatctagaaaattccagtagaatattttgactggtaaaatattgcagtggcctttttggaatasctaaaattgttcccgccacgtatgtataggatttagtcatagcacaattcatattgctaactggttatttttttcagagagtttggttgggagtagtttattttccaagcactaggcctgtttcagttgattgactttgataccctgtcttttgtaacttactttctttaaataacatgcctctcctattttatctcccaggtattgagatgctgtgtgtgcaaagtatggcactgtgcacctaatcagcattctctaaatattggttcaaagagtgaataccatcccatccagaagggtctgcatgttaatttctttagattttcactatggctgggggttaaaaaaaaattccgtatattgagggagactattagctgtgtattatttttttttcctcgtctagcttgaatggagtcttaaacgaaaaattcacatgctcaccaaaaggctgggagaggttttgtaaattgaatatggggttattgtttgcgttcacaaaacaaagccctaaatcacatttagcataatttgtggttttaaattggactgatttagcaaggagagtgaaataatctctcatcctgtcaaaaaggcgatacctttagaccagcatttaattgcactggcagagtaacttcgggaagacggcagtaattctggctgcattattcttggtttgtggctaaattgagatcatcattttctcctggtttcactaactttccttattgctcttcaaactaatcagatgaatgtgctcttcaaactaatcagatgaaggcttagtggtagctggagggtggacaggggagggatgaggtctgtgggcagctgtaatgtatatactttatgatctggggggagaagatgacatccagtgacccagaaggcacagcctggtgattttcttttctttttttttttttttggacatagagtttcactcttgtcacccgggctggagtgtaatggcttgatctcggctcactgcaacctctgcttcccagaagcgattctcctgcctcagcttcccgagtagctggaactacaggcatgcgccaccatgcccagctaattatttatttatttatttattttttgtagagatggggtttcaccacgtcggccaggctggtctcaaactcctgacctcaggtgattcacctgcctcagcctcccaaagtgctgggatcacaggagtgagctaccacaccaggccartcttttctcttctcgagayagagttktactcttgtcacctaggctggagtgtaatggcatgatcttggcttactgcaacctctgcctcccaggttcaagcgattctcctgcctcagcttcccgagtagctgggattacaggcgtctgccaccatgcccagctaatttttgtatttttagtagagtcagagttgcaccgtgttggtcaggctagtcttgaactcctgacctcagatagtccacccacctcggcctcctaaagtgctgggttacaggtgtgagccaccgctcccggccctggtgattttcttggtaatcccttacacacagtgaataccattcatttacacagaagtgttccatggactgtgcacctaagaaagaatgtacatttgcagccacactgtacaggtagggttcatttgcattcctgcaggtatcccagagggagggttctggaggaactttgagctgtctagattacccgatgaaaacttgttcttttatmaacggccacttccggagctcgcgcaggggccgctcactagaccactgctccctgcccgtgtgccccagttcagagtaatctgtattcttcacagtcccttcttccagtgaaagcatctcttttacctttcaccaagccttacctctaaaaggccagtgatacmttagacatttcagaaagctcaaaatgatgactcaaaactataataagcaacgtgcctgtccctttacttttgttcccctgggagttatcaattggtcgtcttgaaatggctagctgcttaaatattttagatgtatgtttggcattttacacacacctttgtggtggttctaatcacaggtgctcccgggtctgagtttaggtctgactgcaggaagcaggttggtctcccagcctcctggggcacccctggaggaagcagatgggatgggaagtaaacctgactgataagagacatcacactttctcaggctgagttccacgcccctgttcatgttcttagttatctggatagtcttggtatcagagtttacgtgaaccatggccaagcttatcacccacagaaatgtttgtagaaagactgaatagcaagtgggatagatgaattacagtctatggaaactcctgctgctgccaatttacagtttgtgcttttaagataaagatgcctttggcttttacatttgtattttcaaatgtatatattctagggaaggaggaacctttcaggtccccagtggctgattttcacctttgatctgaatactagtattcatagcatgctactgagttgactttttgtatttctatataataacagtgtatcgatctcttgctaatctgatgtaacctttgtgtgtgtatatgtatgtatgtgtgtgtgtgttactgatcaagttaaattactccagaggccaaaatcagaaactagggagggtgaatatttcatcatttaaaattgagcttatattgttattaatgcaatgttaagaggacagcttttcagatactgggttatttaagcagcttcaatgtacatcatcccggaagggatttggagatctccatctttcttctggtggcaatgcaagaaaaccaaaagaaaaaaaaaattgcacctataagatcatatatgacaaccataagtatatatgcttcataatactcatttttatagactgtttgtggtacagaaattctcttttgtgcatttttgctctgtttcycccsccccattagccatctgaaacaaactgtgccaagcacttagctaatcatatacgaagaagcatttcttcttctgacggcaatgcaagraaaccaaaaggaaaaaaaaagttgcacttagaagatcgtatatgacaaccataagtatatatgcttcktaatattcatttttataggctgtttatggtacagaaattctctgttgtgcatttttgytctgtttcccccctcattgtccatctgaaacaaactatgccaagcacttagctaaccatatatgaagaagcatttaagcagccactcagaagtgagtgactgcttatgaaaaacctgtaaaaaataaataagaccggtaggtgaattcgatggcccttttgaagttatgtctttctttgctttgaaagaaaaacaaaatgtgccgctgccatcccttgctaggagttccaktcccagattcacactcagcatttttgtttccatagtggtgccaccgaacatcgcagaactgaagaatttggaggtgctcaacttttttaataaccaaatcgaggagctgcccacacagatcagtagccttcagaaactcaaacacctgaaccttgggtgagtatcagtggagcggaaaggatggagaggaagagagtggaaggggcatgccgggtaaggccaggggagkgattccttttatattattgcacagaaatggatttctaatttctttttatgttttgggtcttaaaaaaattttattgttttaayatattctttcagtggcctacattagtgcatatttgagagctaattgagaggctaattgttggcgcaataaggaagttaaatttttattgtattttctgtccagtaaaattttatctcagttctgctgaccgagaagggacttatttgcatagcatgaactggcggacaagtggtaatatggctgatttytttttcctctctgtgttaaattggaatagtttacaaagcaccttcgtgccgtggagggaagaatattttccctaatgatgcttcattcatttatgcaattcttctctttagctgagaggtgacagtcctgtctttctttatgcaaaggtgaagagaggagttttgattcagctgaggttgcagaaccagggagcagtaaataataataatgataatctatttttgtgtattgctttgcagcacttgaccctctcaacatttgtgaggtacggagggcaggttttagtgctttcattgtatacagaggaagccaagccttttcaaaggggctaagggcctggctcctggtcacccctgaggttagcggccaagctgggaagatggttctgggtctgaaggctccttcagaccccattgttatggtctgggtctgtgtccccagcaaayctcatgtggaattgtaatccccagtgttggaggtggggcctggtgggaggtgattggatcctgggggcggagctctcctgaatggtttagcactatcccctcttggtactgtccttgtgatagygagtgagttactgtgagacctggttgtttaaaagtgcgtagcacctccccccttgtgctgtcttgctcctgccatgtaataagcatactcctgcattgccttccaccatgagtaaaagctccctgagacttccccacaagcagctgctgccacgcttcctatacagccggtagaaccacgagtcggttaaacctcttttcttgtaagttacccagcctcaggcattcctttatagcaatgggagaacagacaaatagatccatagaccccaaccggaactgcggcatcagaatttcatcttcattggcgcagctatcagatgaaactgcccactcatgctgcagtctctgtgcaaagtcatatgttcattaaatttgtagccactaaatgctctagttaagttagtgattgacgtggagtggcaatagatgctggccaggtatttcccaggtttttttgtttttgttttttttttttgagacagagtcttgctttgtcaccaggcgatctgggctagctgcagcctccgcctcctgggttcaagcgattctcctccctcagcgtcccgagtagctgggactacaggcgtgcgccaccatgcccagctaatatttgtatttttagtagagatggggtttcaccatgttggccrggatggtctcaatctcttgacctcatgtccgtctgcctcygcctcccaaagtgctgggattactgcgtctggccgtatttgccaatataatagggagcagtcatgaaaaaaaatctcattcatggagtgatttttagtttattgctcccacaaggaatttggtcagacacattattttgaagttcacttgggcttagggaccaactttatgagatccatgggcagcctttattcttatgtctgagggaaagtgaagttaaaaggagggaggaacatcgcttgagatgagatggtttttttttttttctccctacaaatttggagcctgtatacccatctggcaaagcagaaatgaaaagatgctccatttatatcttggttttacaggctattctatcctgatctttaatttgtatgtgagaaagaagctaaaactacatatagatgtatattcttactgttaatttgttcatttattaaatgaaatatatrtacacattatatctattttatatatatatatataaaatctcaatcactaggaacagtgcttggcacatactgagcagtacctagtattagttagctattgttatcatcataattgtcttatttacgttttcattgattccatgactatgtaagtgactattctatgtcaggaatcttcctagtaccggggagccaaggtgaaggttatggtccctgaccttacctattggggcaaggctggttataaacaggaacagaccaatgaggtcacagatatgctggcggttgtggaccaacagggggaacagcaagaccggggagcactttagtccacagatgagatcttcaggagcacaaacacagcagggagcacaggagccgagacttgatgcgtgagaatttctcagacttacaagttgaaggaaggcatctcagatggagtgaatggcactcttttgttttgttttgtttttgagacagagtctcactctgtcgtcgaggctggagtatggtggcacaatcttggctcactgcaagctccacctcctgagttcaggagattctcctgcctcagcctcccaagtagctgggactacaggcgcctgccaccacgcccagctaattttttacatttttagtagagatgggattttgcggtgttagccaggatggtctttatctcctgacctcatgatccacccgcctcggcctcccaaagtgctggcattacaggtgtgagccaccgtgcccggctgagaatggcatatttaaacgctcacagcactgcctgcctggggcctgggaattgtcagttttttggcactgttgagtataaagtgtgaggcgggcggctgtcaggtcagaggtcaggctagacagggaatcctggatgtctgttgttcagtgaatgaggatttaccaagttccttaccatgtaccaggcattgttctagctgctggccatccagccctgatggagcttccattacagttggagaaaccaactataaacaaataaatgtttataataatgacaggaagtaaaaagtgctaagaaaagcactctgtgctaaataaagcagctcctctcgggcgtggtggctcatagctatagttccagaagtttgagaggctgaggctggcaggtcatctgaggccaggagttcgagaacagcctggtcaacgtggcgaaaccttgtctctactaaatatacaaaaattaagtgtggtggcacgtgcctgtgatcgcagctactctacctgggaggctgaggcaggagaatcgtttgaacccaggaggcagaggtttcagtgaactgagatcgcaccactgcactccagcctaggtgacagagtgagactccatctcaaaaatacatacaaaaataaataaacgagctccaattttatactgacccttgagaaatttgcatagcagagtagcagataggagatatggtcatatttccgtatgaaagagtatggagaagagggtggagggaggtaaactagaggttaggagaccaataagaagacgagcttcatgtcccaggtgaactaggacagtgacagtggaggtgggggggattttatatgaaaaatatacaggcggtaacgttgacagacagtaactgatgggatggaatgataccttcatttctgtgttgggcagctgaaaaatacaacagatggagacaggtttgggaagaagataataagctcaaattttgttcttttttgactttcctaataacattttggtttgaggcagcagaggacagagtcgtacacttttctttttttttttttttctttttttgagatggagtttctttcttgttgcccaggctccagtgcaatggcatgatctcggctcactgcaacctccacctsctgggttcaaacgattctcctgcctcagcctcccgagtagttgggattacaagtgcacacacccacacccagctacttttgtatttttagtaragatggcgtttcaccatgttggtcaggctggtctggaactcctgacctcaggtgatccacctgcctcggcctcccaaaatgctgggattacaggmatgagccactgcgcccggccctaaacttttccttttcaatgaatgcatgttagttgccttcttgttctctttggagttgtttgcatttttggctgtcggtgctgtactgattgtgtaaagctttttgtatttaattacatagctacatagacggagttgtcaaagtttgaacaaaactcccagttctttgagaaaggagctaagatgggtttcactaaaggatactctgtcctcaaatggcataaagaattgtactcacacagtgaggcaagttatagggaggactccttattctaaggagccagggtgaaaagcatacacacaggagatcacaaagtggagatgggaagccacttgtatgtgtgatccatcagaatttgctttcaaagtttttatagtatttacagtttattctgatgattgtaagacatgagagaattttaggccacctgaataagtaaaagaaagtttagttctgttctcaattccttaaatgcggtttatttcatagagttattttccaaaaagtgtgaagccacataggttgatgtggcttcaacaattatccatgttgatgattatttctagggtaacttcactgcaggaccaccgtgcccaactgttcgggaataacgtttgacctcgtttgttgctagagcttgtctcataaacacatagaagtttttattaagtcccttgttggatatttgtggatttggattatttatttatatattttttgagacaagatctcactctgtcacccaggctggagtgcagtggcatgctctccgctcactgcaacctatgcctcctgggctcaaatgatcctcccacatcagcctcctgagtagctgggaccacaggtacgcaccaccacgccatgctgatttttgtaggttttttttttggtatagacgggtttttgccatgttgctcaggctggtctcgagctcctgagcttaagcaatctgcctgtgctggccttccaaagtgctgggattacagacgtgagctactgggctcggcctggatttttttaaatttttatttttgataagtgtgagtaggtcactgtggaggtgagaaaaattagtgcctttagacaagaaggtttctttgaagctggaggtgctcaggacaacctgcggagaagaaactgctctgaaaaggaggcattagtacagacctttctggggctttagaagacaaggaaaaaagatgctgaaatagcctgaaaccccctggttttatcaacttctccatcatatgcaggcatttgcccacttccaacacgcatttgaaaaatcttcccatgcaaacaaaagaattgataccacttggcatagctgagccctgcgaagctttatgtttcaacacctgaggtcacctgagattaaccaagtgtggcacaaatagaaaaccacacttgatagttgagactatccagagtggcttgtcatgaggtgagcttgctcgcttagggctaaatcaaaattttctctcaaatcttttgaaaaataattctagcaacagctctcattccctgagaagccacgtgtgagccatggattgggtgttgggtgcttcggatattttctctcttatcctctcagtgatcctgccctgaaggtgttgtcagcctcattttatagttgaggaaactgggtctcagagaagctgagtaacttggtgaaggtcacgcagctagcaagtgctggagccggtctcctcacctagctgtctcctaccttaaagctccatacttttcctaccgccactgtagcctctcatggaaaccttgattgctagcagtgtcagagcggggccctgagcatggaattcctatgtgtcaaaatgtggatggatggagatggatgttagcacctgctggagggaggggggacagccagcatgttccatccttcattctgcagagagagaacccaccatgtcaccatccacctggactggtgtccggagaggtggccagaagtctctgcagttccttggccgctttgtagctggggctgttgctagcaattcttctgaagttttagcatttgtttaaggacttctttctgcccgccagggtggtgtgcctaccactgttacttactgctgtcagcggcacatgggactctgctgtgttccttaaatgttgtgggtattggtttgtcactcaaaggaaaaaggaatctgcaattaagtagattcttgccaccaggaggtggaggggctccaggcttgctctgggctgaagattgagtgggagctctctctcaggtgagatgcctcttccctctaagcctgtctaaccgtggatttcctctacctaatattgcaaaagtgtatttatttgcagagaaaaatgttaaggaatcagcagttttcaaaaagagataaccgaaagcagcgtttaaagacagaagcacctagtgtggtcttctctgctgtccttcctttgacttgcaattcttctcagaatccttgtatcagagcccaagggtcyggagcagctttggcctccgtgcggtatggggtgtttccagacacatgtcgccttcatcagtcacttctgaagtcttggctcctcaccctctcttaggctgttttttcatctcaacatagcattaatgacaagctccatcttacctgtattgcaaggtagttttagtgaacaagcgaagtccttgccataatgtgcttcacaaattgtgacttcatggagaatgtttgttcttgctgtcgtggcagtagatagtcgtggaggtagttttgctgggtgtagtctgtctgggaagttttctgcctgacrgggggaacccgcgtttcccttttggttgccccctctgctgtcagctgtttctggtgaggccctcttggtagggctggatggagctgaatgtgttaggagaaggatcgatggctagaatgatttttattgtcacagtcccttccacctttcagtatctgtcaacttttattaaattttttttttaaaaattggcttttaagtatgctcaaagggaactgcgttaagaaaaataaggggcttgaagaaaggataaaagatagtgtagaaaaaaattcccttagacttcactggagacacgcccacacacacacacgcacacccacacatacccacacgcaccacacccacagcacacacacataccgtgtacaaacacacccacacacacaccacacacacactgcgtacacacacaccaccacacccccaaacacaccctatacacacaccacaccacactcatacctaccccacaccacacacatacccgcccccacacagccccccacgtccttcacacaccacaccccacccctcacacaccacacgaaacacccagatacacatacacataacatcacacacaataccacacacacacagcacacaccccacacacacactcacacacaattgacccttgagcaacacatgggttgcgggagcaacacaatgactcatgcagtcaaaaatccacacattacttttgactccgaaaaatcttaattcctaatagcctacagttggctggaagccttaccaaaactagaaatagttgatgaacacatattttgtatgttacatgtattctattctgcattcttacaataaagtaagctagagaaaagaaaatgttattaagaaagtcgtaaggaaaagaaagtgcatttactgtgctttaagtggaagtggatcatcttaaaggtcttcgtcctcttcatgttgagtgggctgaggaggaagcggagggttggttttgcggtctcaggggtggcagaggtagaagaaaaatatccatgtctcattggacccaggaagttcaaacccatgttgctcaagggtcaattgtatgatttaaaaattttttaggttgtgataaaatgcacacaaaatgtaccgtctttgtagtagacagttcagtggtgttaagcgtattcacattgttgttcagccaatccccagaattttctcatcttgcaaacctgaatcctacgcccattaaaccacacctctccattccccctccctccagcccctggccatcaccattctaattgaagataattttcagtgttagcagttgtagaacaaaaacatgattttccctccaaaaaaggaataaatggaatgaaatcaagcaaaagcctgaaaactacaaagcttcatgtgtatattttgagatattatcactacgttcatagggaagttgttctttacaaggaaagatattttgtaatggtttgagtttttgtgtaaagcagtgattaagtttcaccgttggaggaaaataacagctaagaaattttcaagtgtttcaagatcatgtaagctgtctgactgaaattattagcctaaataggacaacataccacaccttctcacttatatgtggaatgtaaaaaagtaaacctcatcgaaacagggaataaaatggttaccacaggctggagggagaggggaattgcagagatgttagccaaaggacatgaaattttagttaggagaaataagttcaagagatggattgtacatcatggtgactgcagttaataacaatatgtggtataattgaaaattgctaagagagtgaattttaagcagtctcaccacaaaagacaaaaaaaatgacaagcatatgaggcagcgcgtgtgttaaatagtatgatttaaaccattccatgatgtagtatacatacatcagaagtatcatgttgtacaccataagtatgtacaatctttgtcattgtaaatattaaataaatgctttttttaattaaaaaaaaaaaaggatgggcatgggggctcacgcctgtaatcccagcattctgggaggcctaggtgagaggattgcttgagcttaggagtttgagaccagcctgagcaacatggcaaaaccccatctctgcaaaaaatacaaacattagcagggcgtggtggcgtgcatctgtggtcccagttacttgggaggctgaagtggaaggatcgcttgagcctggggaggttgaggctgcagtgagctgagatcatgcctctgcactaaaacctaggcaacagagtaagaccctgtctcaaaaaaataaaaaataaaaataaagtataaagtgactctaggatcatggcactgtcttacactttcagcgtctgaaacagaggtgcccttgatagtctgtatgaaygtgtctttggtgtcatgacatagatttttgtccccctgcaacagcatgaacaggctgaacactttgccacgaggcttcggctccctgccagctcttgaggttctggacttgacktacaacaacttgagcgaaaattctcttcctggaaacttcttctacctgagtaagaaactttcaattctataaatctcctcaaccttgtactttgcgttctgagagggaaatttatttgccaggacccaaactccaagagaaattattggacagagataattttttctttagagactccttttgaatattccttcgtagctcagcagtatgtgcatttgatagatcgttatgtgacaccattgggctgaagtggacttagtaatgtcatattaacattctgagagagattatatacctaaatgagatcaagcctcacatttagctaagasacttgactttctttttaaatagcatgccaaaaaaaaaaaaaaaagtatcttcctatgttgctattaattctttgtaggatatttgcccaggatattccaaccaattatttattaaaaatatttattaataaaccagtaacacaattttaaaattttccagccagtattcctattttgagccttttaaaaagtactcttattgacctatttatccagtacacaggcattaagaaattattggccacaggtgaacacactttattctttcatatgcaaacaaatttcttgctggagatgcttttgaaaattaaaaaatgatttcttctgggaactcatgcactattttggacaaggtttgcttcccttaaatcagtgttctatttcttcaaatagtaacttgtgtggcattcagaaaatctgaattttcagagctgatctctaaaattttattttttaccttacgtacattacctttctatgactttctcaagcacatgaaaccaactataaaatattttcttgggcagtggagcaactatttttattatgttatattaacatgcagttctcgggagtatgagctacaaagatcacttgaggctaggagttcaagaccagcctgggcaacatagagagaccctgtctctagaaataaaaatttaaaaagtagccaggcatagtagcatgagcctgtgatcttagctacttgggaggctgaggtagaaagagtgcttgaggccaggagtttgaggctgcagtgacccactgcactccagcctaggtgacagagcgagactctgtctctaaaaaataaatacgggtaaacaaaacatgtatctaattatactcagcttttttggttgaagataaacagatgctttagaattttagccttcagtaggttggaatcgtattatcattgtgtaataattatgaacaaatttctgactactgatattctccttaagttaggatttactctgttaacttcatgtcattattttagcctctttgtcttcatttacttttgtccttaaggctgtagaaacacgtagtaataattagtcagattatggaactgatgagctgtggttatagcctccatcaccagaaagccttccattaatttgtaacacagtgctatttacataggaaaaggtctattttaacagagctgtattctcttgaaagaacccttttgccctaggtatccataaaagtggcacagtagtgttctttgttttactttggatgcaaatggagaaataaatgtgaatcaaaagtaatctatgagaagtatagcaatcttttctgaaaatgtgctgaaactctgtgccccaaaatgctggcgcccacagttgttaattgcgtcattcctcttggatatagatgttttcctggacacaccagctacacaataagccagtaaatctaagtttgacctgcttgttattattgggagccctaggtatgtcaaaggcttttcaccaagccagggttattaatcaaagctgactccctcgtattgatcagacctcaaatggttgtgttccatgccaccctgtttatatattgctgtttaatttgcagccaccctgcgtgcactctatctaagtgacaacgattttgaaatcctgccgccagatattgggaagctcacaaagttgcagatagtaagtaatttatctaaattcttagaaaatcaattcactgctgcagccttgtaggggtagaatcaagtcaatttgagcaggagtaaggtttgttttgtgggaataaaccactactcctgatagtgtttcttgattatccgccggcacttgtaaatacatggaaaggattgagctttagtagaagagaggacatagaggatgagagtttctgtggagcaccttttaatgtgtaaatatgttgacaacttgttttcttctgtttagctcagccttagggataacgacctgatctcrctgcctaaggaaatcggggagcttacccagcttaaagagctccacattcaggggaaccgcctcaccgttctgcccccagaactaggtaaggttgctgatgaatgaacttagttctgggtttcatgaataacarttatcctaatgtagcaattctgaacaacctctgtcctcttcttggcaactactctccacctaggcacacgatgctgatcatttgagaaccatttgtcattgaccagagttagctgttacaggtttgaccttcccggatcctgtgttctgcagctgtagtgtcccctgtcttagaaactgctgatgaaagatgaccccgctcagctccctgcgtgatgtagtgggaaaagcatgggattagtagtaagagccttatccctggctcctcattgactagctgggtaagctttctgggtcttggttggttattaataactttaagtatcactcttactttttaaccccttaaatttttattgacctggaaaaacttttaccaaatagttaaagtagttgttatggctacttgaacatgttgatacctctgcgggtcgtgaatttgcctctctcctgatcccatctctagtaggaattgttaaatatgttcttgctgggaatggatcctactcctggccgctgaatcctaatcctgtttctctgccaggtcgttcctatttccagggtgggtttatgtcccccgccagaaataacctccaagccagtaattctgttactgcttcgttccactgcaaaaggttcacgagttcccttatcttttcttgtgcagaccctccatagcctctcatttcttcagtcctttgaaccacattgttttctcaaactgcgattatttgcttttctactccaaaataccatcatttttaagaaacacattgaggaagcagttctttaaacaagtttggcagtttgaagaggccatttgttagaaattagaatgcaatcaccaggagggcagggacatttttgtatttgttccctcgggtacagtaggtgctcagaaaacactgactgaatgaattaatgaagcaaggaccttggatgacaggacgttaggaaggttatgagcaggctcatgtggctaatggttacgcataggaagactgagacacagagcacgcctatcagcaccttgagttctgttggcagccatattagtctaaagggaaggcagtcacgtgatttcgtggaccagctgggaagtcccgcctcctctcttgccatttccsttagctctcttgctagtgttaaaaatccacctagaggattatttaatgattttttaagggctgaggagcaactcaacacttctctttactgagttgcaagtagtcacgtgttgctttgggagcagggtgacagaatcaagaaacgctttttgcaaacattttcaaggcaaaaaacttcttgttaaaggagagatctcgggccgggcacggtggctcccagttgtaatcccagcactttgggaggccgaagcaggcggatagcttgagcccaggagtctgagaccagcctgtgcaacatggtgaaaccccgtctctacaaaaagtacaaaaaattagctggacgtggtggtgcatgcctgtagtcccagctactcgggaggctgaggtgggaggatcacctgagcctgggaggtcaaagctgcagtgagcagtgatcgtgccactgcactcctggctgggtgacagaacaagaccttgttgaaaggaaaaaaaaaaaaaaaagagagatcttgtacagtggttaataaccacagatgttagcataagtaatagctggggagcttctgcagaactcaaaaacttgctccctccccaacctactaaatcagaatctccatgtgtgaggtgaattcttctataacttggtgtaaagctcacttaatgcctctgacatgtatgcttggttagtgtggttagtagaaacggaaaaataaatgtgtattttgatgtcatttgatcttatttcatttttcaagcagtgaggcaacgtaggatattaaacaattattttatcagacagtaatttgccacaaaaatgtctagttgaacctacgcatgcctatgtatatattttaaaatcttactcattttgcttatcttatttaaatactgcatgaggtcatatttgttcaacatttctgtaaggctttccattaacaaatcatgtatatttttattcaggtgtagaattgagggggaaggctttaaatgactttatttttgcgagccgtatgtagaaaagcttaatcttaacatttgcctgatagcagtttttcctgattatagacaaacagttgtaagtacgtgataaacctttagaagtcactgtcacaagcaaaactcaagatgaagacaaatggactatttatttttgaatggtgattttttttaaaaagtcaagattagtatactactaayacagtaacagctattataataataggtagtatctattaaggcctggaattgcaaggcactgtaaatgtttttcctgcaatatcacctataattatcgtaagaattataaggagactttttaaagatgaggacactgaggcatagagagagttggttgctgacaagtctgtggggacacagctagtgagtcaggtgagatttgaacctgacagtccctcctctgggtccagcttcctgatcacggtgaggtcctttttcccacccatatgctggtaagaggattcctagaaatgcagtttccaagtttgaacaaaacacaaccccagcacactctcccgaaaaggcaggcggagagatgttgctggatggtgagttggcgtgggctttgccggcatgtgagcaaggctagcataacactttgcaaaacgcagctgagatggcctctgcaagacaaattgctggccctttccaagccagttgcgttgtccccgtgtctctttcccctcagtaaacatgccccaggatgggatcgtctttggtttttttgtgtccccaacgcctgaggtgaccatctggatgctgctccgggctggctgatgggcagtgctgggcactggtgatgcatatgaagcttatgctgcaggtttgcttctgggggtgttttaaagtgtggatgatgatctctcgctgtatattttttacatatctgaatacacgagataaatgcttttgagatttctgtgaaatttcctttcataataaatccagagtttattgacttgtaaactttttggtactggtatttgagccaagcaagagaatccaggcgagttctgatttatcaggtctgagaacatacagggacacagcaaaataaagtcaggggcttggctggaggtttaatacgtgattgtgttactttaccttcactgtgtgtctttgaataagccatttaaactgttatgtctggttcttaagtagtaaagcacttgctttcatattagtctatatacctataagaaatgagatgtaagttgagtctcgtgtacccattcattcatttattcattcaggttaagttcctatttgagggcagacctttgagtccaaggaacttgccttttccggtaaagtaagagtcacttactcaacaactgtttgttgagcccctggtatttgctagggattagaacaagagacagaacacgcgtgactgatgatgttctagcgggagaagacagaagaaagagagagagaatatgaatgacagatatgtggtattaagagctctgggaaaaaaatggagcatggaagggagagcccggctggggaacgggtaatcagagaaaccctcactcatagggtggtgccctttatgcagagacttaaaggaaggagggaggtcccctgacagagagaatggtaagtgcaaaggtcctgggtgggcttgtgttgaggaagagcaaggccagtgtggctggaacagagtgagtgaaggggagagagttgtaagcaatgagcttagacaggaaatggggtctggttcacatgggaactggtaggacattgtccgaacttgggcttttactccgggtgaaatgggcactcctatagatgctcccgtcctaatcaccagaatgtgagaatttgttaccttatatagggaaagtgactttgcttatggactttgtagtcttgagatggggagattatcctggattgcccaggtgagcccggtgtaatcacaaggggcctcctaagacagaggaaggagggtcagaggtaggagtagaagacatggtgacagaagcaagaggctggagtcactcatggaaggggccacgagccgagaagtacaggcagcctccagaaactggaaaggcatgcagccggatgtcccccctgcaatcccgaagcctccagaaggaatgcagctttattggcacctcaattttagctccataaaatccagtttttggacttgtgcactctacaacagtaagagactagatttctattattttaagccactgcttgtagtcattggttagagcagcaaaaggaaactgatacaaatgggaagacattgaagggttttgaggaaaggcatagcatgatctgactttcttatttagacacagagtctcatgtgatcacccaggctggagtgcagtggtgcaatcatagctcactgcagcttctgtctcccaggctcaagccatcctcctgcctcagcctcccaagtagctgggactacaggcgtgcaccactgtgccccactggttttctcagttttttgtggagatggggtgttgctgtattgcccaggctagtctcaaactcctgtgcttgagtgatcctcctgcctcagcctcctgaagcactgggattacaggcatgagccatggtgtgtagcccctgactgtttttcagaggagttctttggctgctgtgctgaaaataggctggagggcagagggcaagggtggaagtggagagtctgagagataggagactatcatwgcaatcctggtgggagtagatgctggcttcatccagatggtactggtagtggtagaagtaatggtcggatactggatctgtttccaaggcaaaactaacaggaattggtgacagtttagatgaggggtgagagagttaaggttaactgtgaggtttttggtctaagcaactggaaggctgggaaagattttaggaagagtagattaggagagggattgaggagaggaggtcatcctgacctgagcctcagatatcttaaatttgagatgccttargggtgtctcattgagaaggcgatagggtataagaatctagagtccagaagagacgtctaggctgcatatatagtttggggcattatcagcatacatttaagagtacaaattggatgagatcccttgtgtgtgactgcagagagtgaaagattgagcctgaagcactatggttcctaaacactgaagccagaaggatcgaggatgttaatgggtcgggctgactcccaggcagacatccgtggccattcagggactgtggccacctcggttgacaccacagatggctccccattgctggagctgtgtggtgtgttttagcttcataggaaaaaggggttctcttatgagacagatgggggttgggggattattctctttttcctgacatatgcagttaactcggccaggacaggacagtggaatgcayataattgaaatatcctccggagcctgcctgaatgcagaagtctctttttgcccagtattttcagccagcatccagactcctaaaaagcagccagccgtgtggctaactgaactttcaccccttttttgttcttttatatattatttcttagaagaattaattagtagagagrataaaaatcctgcgttggtagtgaagaaaggaaactcaatgcataccctgaacaatcctcagaataggtcaacagccccaggaaaaaaaaaaaaaaaaaaaaaagtgatttgggagctggtgacgtcacctggggtttgttagcagttttctattccatttctgcattttctcacctgccgatgagaccgctgttgtgtgagctgaagatctggattctgtgttttgcataattctctttcctgagcattccatggtttctgctgcttgttctgaattggaatcgtttctggttgcttggcttctaggcagtaatgggacctcttgtcccgcatttgttacccagataattttgcctttggagaagagggaaaaaaaatcacattggtctgctcggcatgcaacaaaacaaagtgctatagacatcaaaaccttaatttgcaccaatcccagcagcctatgggacgtatgtctgcaacgctgcatacacctggggctagccagcttagtgccctgcaatatgtgcccacaatcaataacattttttactacagtaactatgagaagcatagtattttctagcatacttgtgaagagtggaaacaaatactaatccccttcagagagtaaaggatgttatgaattgagaatttcctctcaattatatactccagaataaacagaattaacaatgagtggatgtacagtcaaaaatctcttgttatatctcttaatccttttcctgtggacattaagaagctaaagaaaaataactttcttttctgaggcagggaagaagaaaatccagtatttgtttggtcawttaagtccctgattataagtgtcttgtttatcttctcttctgttactgtcattctgtcaactggttcccatttattttatccagaggtttaaaacgttttttaaatgtaaacagtagaggatagaggttaagtgctggactctccatcactaggcttgggttcaaacctcactctcccactgccttgttctgtgaccttcagatattgatatgatgtggctctgtgtcctcacccaaatctcatctggtagctcccataattcccacgcgttgtgggagggacctggtgggagatgactgaatcatgggggcgggtctttcctgtgccgttcttgtgatactgaatgggtctcacaagatctcatggttttaaaaatgggggtctcmtacacaagccctctcttgtggctcctgccattcatgtaagatgtgacttgcttctccttgccttccaccatgattgtgaggcctccccagcctcgtggaactataagtccagttaaacctttcttttgtaaattgcccagtctcgggtatgtctctatgagtagcgtgaaaacggactagaacagataaygttattttacctcccttctacacctcatgtaaaatgagggtaataacagctcccacctcctggtgtctttgtgaggattaaaaggataatctgcttaaagaatttagccttgattcaggaatgagtacagctgctcagtgaatgttaggtaaatgaacacacacacgcacatacacatacgggcacagtggatatttatgctattaaactttgactgtttagagaccagctttctgaaacctgggctcttctgaaacagtctaagcagagaggtcaccccagccccacccttttgacagggaagaggcagttagttaccgagtgcctagtgagaaagaaacaacagagtagatccaaagccaaagtctcacctcacacagtgggattggtcagtgtatcctgtggataaaagaaaggctgggaattatcctcctgtgtgaaaactgaggcacataggaagggtcagaagagaaaagygagggaaaagaaggggcaagagggaggagctcagatgaagggattctgcatggccagtactcagggtggacaaaagacatagcaagaagagtatgcccgcagtccatccatcctaagaattttataattacaagcaattttccaagtctgtgcctttcttgggagttttatattgaggctgggagcaagttctggttgttctgtgtaaaaagctctgattggctttttggttggaccattggttgtttcattcactcattcacccattcattcaattctttctttttgacatcctttatatgattattaacttgttcctagtaagtgttgggtactttgtagtacttgcagtaactgattagactcacttctttatccatattaagatcttaaactacctctctgcaagtgacaacattattttctaattgtttaatttctcactgtcttaacattaccttttgtgacagcgcttatttcattggggattttttttattctcccagaattcatgataacaaccactgttctgaaccaattgcttcatttgttatatcagttgtgtgcctacactataatgcatttgtcacttgtctacatattagtaatttatttcatgtttaacatatgctatataaatccatcttttgaaatctttattatcaattaaaagcattatagaaaaagaagtctcttctggaggtcgacaaagtagttcagctcttatatgaaatcttttctttctttcttttttttttttttgagacagagtcttgctctgtgtcacccagactggcttgcagtggcatgatcatggctcactacarccttgaccttctgggcccaggtgatccttgcacctcagccttccaagtagctgggaccacaggcatgcatcaccatgcctggctaattttttaacttttttagagattgagtctccctacgttgcccaggctggtctcgaactcctgagctgaggccgtccttccaccttgtcctcccaaaatgttaggattacaggaatcagccacccacctggctaaatcttttaactatttccttaagaaaagatgtagtgcgattattaactatgtctagaataagcagactccaaatacataataaaaaagttaatttttttagactagatttttgtttcggggtaattaccttccccaacccaaggcagctttatgttgttaacagaattggttttcttgcctaaatcctattactatgaaaagaaggtctagcttaatagatagagcagtaagtgacaaggatgttctttatggaattgtaaactgtgccactttcgcatgaataagattgactttgtcaattgatcactaacatttttcagattagttttaagctagatataattacagacatatcttagtttttgtgcagaatatcgtaatttgcagaagagtttcatgcacttaatctcagttgtataatgtaggcaaggagagctctctggcctctttttaaagatgatgggaccaagggagattgtgacttgcctaaggccacgttattgacatggcttattatagacagaatccagtttttagttcagatcttcctaattcaaaaataagcattcctcccaatggtatacccatcaatgtgtcaaaactgagccaataaaaaggcctaatttattattaggtgacagattgctgtggttccaaatatatgccttaattttatttgaaaaagaaaatgttgggaatagaatatttgtacccaactttgaattttgacttggattttattgcatgctcctacgttttaattctgcattaatatttcttttgccatacttcacaaaaaatcataccatatcctttgattcccctggccttcactgataatcaaaaatgactcccgtcaagtctcctacatgatattttttaacaagttccattttatatattctatttcagtgaaatctttagccccagaaaatgttttcagcatggatttttaaaatgctaagtgaattgtatttctgcctggtgagttattgccttaaaggggttgggaagttgcaacacataaagygtttccrttttgtagtataaatttcaggaagcccagtgtcaggttcagcgtgattgaacatgtgcatcaatctgtgttaacaccagctggaaaagcttgccactgtgtgcagtggacttcctttgatttaataggatgctaaatgtattttgccctgggagaaatgccggcagtgctaacgttccggatttaattttttttttttttaaattccagaggcatgtctctaaatacagttgttatcacctcaatacatatataatatcttacatttatgtagcctctccctttgaggcatctcctatatattatagtgttcctatgttaaaagaaaaaaaaagcaaggttatactgagtcagacccaaatggtattgcatgcgtgtgtgagtgtgagagtttctttcagagtgcagtgggagtttgaaaggagtgaagtgggtgacarttgtccctcatgttgtcaacacctgaaatctaggccttaccgtgacatcatggatcagtctttcatatttatatttagacctttccagaattcttcacattttcaactgagtattaattccctaagttgactacccattacacaaaagcatctaattgtaccatttatactcctgtgaagttttgggtgatagcattctaatattagtaaataagcttatgctcattttttcaacatacgtagagtgattttaacacgcctagtactctctgttgccttttatatttgctgttttaaaaatatcggctcttctccttggacagcccctattgaatccatcttaaccataccagaatctgacttccaaccccatatacattatatttctgtaatcagttcagtttggggagcactggttaaatgaaacatacataacccttaccttcatgaagaaaatctttgaaagaaagaaacagctgcacaaataaacattacaaaatggctgctagaatgtaagcttccccaagacattggtttaagccaccctcatctctcacctgggttgctagagtaacctttcaactggtttcctgcttcctaccttccctttacaatccattcttcaccccgtagtcaaggtgatcttagaaaattacagagtggattgtatgcctttgtcaattagagctctttaatkttccctaggaatatttaaggcccatctggcacccatggtttccatgctacttatcaccctcactcactcatgagccgctgtcaataacctcctctcactttttcatgatctttgctctctccttggaattttcacctgaatatttttgcagctcataccacacaattcatacattctaagtgtacaattcagtgttttttagtatgttcagagttgtacaaccattaccacaactttagaacatcgtttgttacctcaaaatgaaatgccatacccttttctttcccactccaatccgtccatctctcctagccctaagggttttatagtttggctcttacatttatatctttgatccattttgagttaatttttgtatgtgatatgagctaaggattcagttttattcttttgcctgtggctgtcctgttgttccagcaccatgtgtagaaaagactgttctctttttatcaaatggtcttggcactcttgtcaacaaccaattgacagcagatatatagttttatttttgtactttcaatgctatttcacttatttatatgtctatccttatgcgagtaccacactatctttagtactgttgctttgtagtaagtttttaaattggggcatgttagtttcaactttgttattctttttcaagattgttttagctattttgaggcctgtgagtttccaaatgaattttagaatcagcttgttaatttatacaaagaagccaacttgtgttttggtagaaattgcaccgaatttgtagattatttcagggattatcataatctcaacaatatgaaggcttcagttcagatccatgaacatgggatattttttccatttatttagatcttcgatttctttcagtaatgttttgtagatttcagagtttttgatacttttgctaaattttttcctaagcattttattacttttgttgctattatatatgaaattattttcttaattttacttttgggttgttggttgctagtatgtgggaagacagtggatactgtattgattttatattttacaaccttatgaactcagttattctcattgttttttagtggattccttagaattttctctttatgagagctgttttacctcctcctttccaatctggatgtctttaattttattttcttggcaattactttggctgcaacttctagtacagtgtggaatatagatggcaagagcagacatccttgtcttaaatcttaaggggaaagcatccagtcattcaccatagaatattatgttatctgtaagatttttttgtgtaacccttgtcagattttacaaatgcccttctattttttgtttgcagaatgatttatcatgaaatgttgaattgtgtcaaatgccttttctatgtctatgtggcttttattttttgtatcttcmtttttatatatttctggatttcatttgttagtattttacttaaaatttttccacgttcatgagggatattagtttgtagttttcttctggtattatagtatctttgtatagtttttgtttcaggactatcgagtctcataaaatgagtaaaatttgatagtttttcttttttgaatgtttgaaaaaattcattattgacgccatctgggtcttgaattttctttgtgggaaagttttgaattatgaattgagttttttgatataaggctcttcagattttctgtttcctctagagtcttttggtaattctcatgtcttaaaaatgtacattttggccgggcacggtggctcacgcctgtaatcccagcactttgagaggctgaggcgggtggatcacctcagttcgggagttcaagactagcctgaccaacatggagaaaccccatctcaacaaaaaatacaaaattagccgagtgtggtggtgcacacctgtgatcccagctactcgggaggctgaggcaggagaattgcttgaacccaggaagtggagtgagctgagatcacaccattgcactccggcctgggcaacaagagtgaaactccatctcaaaagaaagaaagaaagaaaatgtgtagtcccagctactcaggaggctgaggcaggagaatggcgtgaacctgggagccggagcttgcagtgagccgagattgygccactgcactccagcctgggcgacagagcgagactctgtctcaaaaaaaaaaaaaaaaaaaaaaggaagaaaatgtacatttcttgcaaatcaaaaccacaatgagataccatctcacrccagttagaatggtgattattaaaaagtcaggaagcaacagatgctggagaggatgtagagaaataggaacacttttacactcttggtgggagtataaattagttcaaccattctggaagacagtgtggcaattcctcaaggatctagaaccagaaataccatttgatccagcaatcccattactgggtatatacccaaaggattataawtcattctactatgaagatacatgtgcatgtatgtttattgcagcactatttacaatagcaaagacttagaaccaacccaaatgcccrtcaatgatagactggataaagaaaatgtggtccatatacaccatggaatactatgcagccataaaaaagaatgagttcatgtcctttgcagagacatggatgaagctggaagccatcattctcagcagcctaacataggaacagaaaaccaaacaccacatgttctcgttcataagtgggagttgaatgatgagaacacagggacaacagggaggggaacatcacaccctggggtccgctggggggggtggggggcaaggagagggagagcattaggacaaatacctaatgcatgtgcggctgaaaacctagttgatgggttgataggtgcagcaaaccaccatggtacgtgtatatgtacgtaacaaacctgcaagttctgcataggtatcctggaacttaaaataatttttttttaaaaagtacatttcttctgagttagtctgtattgtccccatttttattgttaatttatgttttccatttttcccccctttgattgattggtccaaatagctgattgtagtttcactgagttattttattctttgttttgtatttcaatgatttgcttttcttcttctgagtacagctggctgtgatttttctagcttgtttaggtgaaagcttacgtgattgattttcagtttttcttctttttttttgagacagagtcttgctctttcacacaggccagagtccagtggcgctatctcggctcactgcatgctcygcctcctgggttcacgtcattctcctgcctcagcctcctgagtagctgggactacaggtggctgccaccgggcycagctaattttttgtattttttttttagtagagacggagtttcactctgttagccaggatggtctcgatctgctgacatcatgatccgcctgttttggcctcccaaagtgctgggattacaggcgtgagccaccgtgcccggcctcttcttttttagtgtaagcatttcaagttagaagtttttctccgttgttttagcagcatctcacacattctgtaatttcattatcattcagtttcaaatattttcttttgtaagacctggggcctgttatttagaaattgagaatttgtttgttttcaagtattcggagatatccgaaacattttgttactgatttctaatttaaattatgtcctgatcaaaattcatagtctatataattctartccttcacaatttgttgatttgttttatgggcctgcrtattctctagttggtgaattttacatgcacacttaaaagttttatgtgccccatcagtgttccataaatgttaggttacattagttgatatgttataactcccrgtaatattgtttttttttttccttaagttagttttcttaaataactttagagaggaggaaaaagtttttcacattgactgccgcttctctatttaccatttctgatgctcttctttccttgatgtagataggcgcttccatctggtatcatttgcctttatcctgaagaattttttcttttgtatttattgtagtacagttctttttggtcattaattagcttttgtttatctgaaatatttttattttgttttcagtttttggaggaattttttttcaggatatgaaattttaggttgacaggttttttattttttttacttctaccttgcttcaagggtgttttcttgtctctggtttgcattgttttagtgtctttcttacattgttctctgtgtctatttttctgtggcctcttaaaattttctgtttatcattgggttttagcagtttctcatgtaacatgttctttatttctttttgacagttttatggagcttgtctcatatatgggtttatagtgttcataaagtttgataaattttcagccattttttaaaattaattgattggttggtaggttagtaattttcagcctttttttttattgattgattgatttcccatctctctctcctctcctagaacttacattactcttgtgttagatcacttgatatcttccacaggtcacttatacaaaactttttatcttgttttgtttcttttcatcatcttcccccctcccctcccccaccatcccccttttggcttcagtttggatagtttcttgtgcactgtcattaagttcagtgattttttttgttctgtagtgtctaatctcctgataagcatattcagtaagatttattgtttcagatgttgcatttttcacttccaagtgtatgcaaggtatagctctttttataatttcatttctcaatttagatactatttatttccttattatgttcatgtttttctttaaatctttgcacatattttaaattgctgttttaacatttttatctggtaatgtaatttctgattctgtttgcattgatggatttttcttttgtttgtaagccacttttttcctcttactctgaatgtctagttttctgtgggtttttttgttttttggtttttggtttttactgtatcgtagacattaagaatagtacatttttggttgtatgaattctttttgtctttttttatggtctgttgggtttcattctagcaggtcgttaatttttggttagcttgattctttcagggctggtttttaatgcctgttagacttggtccttactagtctttactcctgggctagattaaccctaatcttaagacttctgggattactgcctcttgaccagggtgcttagtaacatcgttactctctggctgatcagagtgtgagtgttttctagttctgtgaaaactccagtgattgtttagcttatatcttccttgtaattggtctttccctggtagttatatcttccttgtagttggtctttccctggtagtttttgttttttctttcccagcctttaggagtcttgtcctgaacattgtagttaatatttggcaaagattcatgggaattcctgtgcagctttctgggcctctttttcttcatagctcctttcctgctatgccctccttgccccacaaattccagctccttgagtagcctcaaactctgatttctgtcctttcaattcagcattgccactgtattgtttgatccactcttgcacagctgtctggaaatgcttctcagagaaaaccagagtgaatgtggagttttccttactcattttccttccctcatgcatcatagtcctgtgctgcttgtttcctgatacggtttggctgtgcccccacccaaatctcatcttgaattgtagtttccataatctccacatatgggagggacccagtgggagacaaatgaatcataggtgctgttagtccatgcttctgttcttgtgatagtgagttcttacaagctctgatggttttataaaggggtttttccccttttgcttggcacctctccttgctgccgctacgtgaagaaggacatgtttgcttcccctctgccatgattgtaagtttcctgaggcctccccagccatgctgaactgtgactcaattaaacctcttccctttataaattatgtagtcttgggtatgtctttattagcagtgtgagaatggactaatacattgcccaatatctagaagcatttctattatacattttgtccagttacttcagaatgccagaagcaaaagtctggattaatttttgataactgccaatgtggaaaggtataattatttttctgctcttttcttacccatttacacaaccgccagaggttatttttgctcaggtcattccctcaaccctgcattcactggctggattccatagcagacatagcggtattaggatgcatatcagacttcatgttatgtacacatgttctttaagaccattttcatctttattcttggtattaacaagtttttaacccctagaataatttcttggtctttattgctttttaacttatctgttaatgcactattatagccgagaccaactgtattagtttgctgggtctgccataacaaagtgccaaagactgggtgacttaagcaacagaaataaattttcttgtgttcgtggagattagaagtctaatgtcaaaataacagaattggtttcttctgagggtttaagggaatgattttttctagacctcactccttggcttgtgggtggcccttttctccctgtgtcttcactgtgccttccctcagtacctgtctgtgttcagctttgcccttcttgtaaggacaacagtcatattggattaagatccactcatatgacctcattttaactaaatcatctctgtgaagtcaccatttccaaatagtcacattctgagatattgagggttaggatggaattcagcccataacaccaaccatttctcatgtttcttactttttgctgctgagccttggtgtaaaacttgatatcctgtgatactgttgcattgttcacctgcttattcatgtcatcattctttttcattattgcaacaataagtcaagttaccttaagccattatttttcatcttttcagaaatctttgagaaacaagtgaaacctatggagataacccccccaatatatattttcacatatgacattttacatctaatttggagagttttaagatgcccccatatccacgcatgtgccctttagtgcagaattcccgccccaaatattcatcattgtaaccctttattctaggttccatccactgactggtatagatgtcattcatgtataactaccagatttccccctgaatcacatgcagatgaagaagagtgtgtgagcacaggatkcatgaatgcctagtgcaggaagttataggtattgaaagggaaaagcaatacatcactcatttgatctgctctctttcagatcataggatgtagtggtagatggtcacatattaaactttaaagaggtgttggctttcttcccccttgcatttaaaaggtgatgtgctgcaatgtgagacaaatcatgattcactacaacagtgttgcagtcagttatataaattgccaatgaaacactaaatctgtcactttgtgtgttccgacagtttagcaattggagtcgtgttggaagagggctgactgggaacaaaagaagctgatatagtggcagatgcaattagcaagatcaatggttagtgttaaaggttcattgtttggtcattttggttgactgaattgaaagcaattgctatctaaaagactttgccagctgtaatttgctataagagaatgcagaaaagttagttgcccaactttataacatcttggagactgttatttctcaacttgctgtgttcctaggacagtgaccaaaagattcagcttgttcttctcattcaagctcattcaagcttttaatagatactctagaatttctgcatgttcagtatatatacgttttttactttagctgttcacctacttctttcacaaaaatttttgggtccgtgttatagcctttataacagttctttgaaccctaatttattacagctttctgttgcttcagactatgagagttttcgctgatcactacttgaactatagcaaacaccactttgaataacattgggttttctgtttttgtttgtttgtttgttttgcgacagagtctcactctgtcacccaagctggagtgcagtggtgtgatgtcacttcactgcaccctctgcctcctgggttcaggcaacactcctgcctcagcctcttgagtagctgggattacaggcacctgccaccacgcttggctcatttttttttttttttttttttttttattgtcgtagagatggggtttcaccatgttggccagactggtattgaactcctgacctcaggtgatccgtccatctcggcctcccaaagtgctgggattacaggcatgagccaccatgcccagccgggttttctattttaataagatttatataactttgcatttcagtgccttaaattgaccagtttttagaaatgaatataggtgaaaatatttgcctagtaatgatgatggctgatgatactaatagtccatttatgagtgcttatcttccctaagataggtcatcttaaataagatatttctgtgagctggagttacttttttcccattttacagatgaggaaccttaagcttagagtaacctgtcaaagccatgcaggtagactttatcaaactccatccatgcttccaaccttggaagttaaccaagagcttttaaccacttctgcagaagtggttaagaacctatgaaatgtttattaaattcttatctaatatcttcgtaagcctttctgaaaggcacaaaaggtatgacccagttctgtttctaacagagctactaacctagtgaaacttgaagaatagttaacctgttaaattggaacaccaggtgtcactgcagtagaaatgtagcctgggcagaaatcatcatggcttgagatagtctaaaaaagcttctgcagtatcttagtcagcttgggctgctataacaaaaataccatagactgggtgacttagacagcagaaatttatttctcatggttctttgggctgggaaatctgagatcaaagtgctggctaattcatttcctggcaagagctctctttctggtcccaggtgacacatcctttctgtatcatcacatggcagagagatcatttttcttgtgtctgttcttataagagcactaatcctatttataagggctccactctcatgacctaattctcttccaaggaccctacttccaaataccatcacattagcacttagggctttaacatatggatttggaggggtcataaatactcagtccacaggaagtagaggtgagattttagctggcacatagcagaatcaacaatggtaagagaaaatgcaaagcagtggtatatattacatttcatgacttgaatataaatttaaactgttgttaggctatggtctctgtccctttgtgtacttcccatgagcactcatcagaaytgcttttcattcagttaggtcttctgtgactagttgggtaatactgaggcatcagtttggtggaagctactgatactgtacttcctcatttagcccagttggttctcagagtttataagtccattggccccttaaggaagtcaatgaaagccatagattctgtctaggaaaaattgtatatacttgaccatgggacctgggattaaatatctctgccctgtcccaacaatatcggcttatcttaaccactctcaaaagcgttggagataaatggcagaaagctactttttatacctcagtagaaaaaaaaaaatgagcaagaacagatatttcacaagagaagatcaatgaccaagcctataaaaaactggtcagccttagtagcagtcaatgaaatgcagattaaaacaagttactattttttagaatatcgattaacgaagattttaaaaatgataatgcaaagtgatagtaaaggtttggtgcaatagacattttcatgcattgctgttggattgtaaattagcgtgttaattctagacccatttttggagtatatgccaggcaccgtaaaagcttccaaccttttgttgcagtaagctcccttsgaattctatcatcaagaaataatcaggaactcagaaaaggttagtataaatatgtttcttgccacagtatttttttttttttttttgagacggagtgtcgctctttcgcccaggctcgagtgcagtggtgctatctcggctcactgcaagctccgcctcctgggttcacgccattctcctgcctcagtctcccaagtagctgggactacaggcgcccacccccgcgcccggctaattttttgtattttttagtagagacggggtttcatttgccacagtacttttaacagtagaagctttgagccaccttgatataaaaatggttaaattaactagtagatgatggaacataaaatgacacgagaatacttataatagcacattataagattgcatttacaaggccgggtgccatggctcacgtctgtaatcccagcactttgggagtctaaggcaggtgcatcaggagttctagaccagcctggccaacatggtgaaaccccatctctactaaaaatacaaaaataagctgggcgtggtggcgggcatctataatcccagctacttcagagactgaggcacaagaatcgcttgaacccaggagacggaggttgtaatgagccaagatcacgccattgcactgcagtctgggcgacagagtgagactcagtctcgctgaaaaaaacaacaacattgctttacagtgtgattccagttacagagaatattcacataggtgcataaataaatgaaaaaattattggttaatgtctctgtatgttgggattctcagtgattttatttttctactttttattttttataatttctccagtgtgttggtgttagctttatagattatatcaagtaaccttttgctgcaccaaaaaaccccccaaatctagtggattaaaacaaaaccatcttacaattttgtcagaactgtctaagctgatatttactgggctctctcctgaatgtggggtcagctggggggttggctaatagggtaccctaggatggtctcactcatctgtggtggttggcagaccgttgtccaagacactgcacttctcttccgggtggcttctcacgccttctgatgtgctagcttgggtttgttcacatggtggtctcttccagggatagtacaaggtacagctcacgtgcatgaggtgcaagttgatacagtttggatgtttgtcccctccaaatctgatgttgaaatttgatccccagtgctggaggttgggcctggtgggaggtctttgggacattggggcggatccctcttgaatggcttggtgtgtcctcatggtaaccagtgaggtcttgctttatgagtccccaggagagctgattcttaaaaagagcctagcacctcccttccgtcttgccctccatcctctcgctgtcatctatacacaacagctccccttccccttctgccttgagcggaagcttcctgaagccctcacaagaagcagatgctggcgccatgcttcttgtgcagcctgtggaaccaggagccaaataaaccacttttctttgtaaattacccagcctcaagtattccattatagcaacacaaaaatggactaagacataagcccaggtacacaagcactttccaagtctgttacattcacatttgctaatgccctctctattgaccaaagcaattcacttgattaggcccagagccagtgtacaaggaaacaccaggggcatggaaggtacagaggagagggcgggatgatcacagctgtttttgcaaacaatctttgacataaacagtgatatcaatgccataaaaaagaaaaataaacccctaacccatctgaatcctagtgcagagccttctgagagtgatrgtatctttatgttttgactgcttcagaggtctccatatcttttcatgcctttgtggttacaaggagtagcgaagacgggggcgggcagatcagtgatcaccttccttggccttccttggccatctagcatacagttaaccttccttgactatctagccttcagttcccctaccactcccttttcagcctgagtggccaggtacttgggcttatctgttaatttttctttctctttcactgaaacttcctgccacacccagaagaaaaccaatarcatggtactcacagggaggtgaatagaattataatcgaagagtgctcattttgtgggtctgaattggaagtgtatttttgtttttgcaatatcrctaataatgtttcctagccttgtgtaagaattaaaatgtgttgcatttcattgcaaattttctgtgccaagacaaaagtagattattctactctcactttgtgtaacaggaggcaaaagcttccatagatgctttatgaatagtattttgaggcctagaaaaataagttgcagagtagctgaaagtgctaatggagataaatacgcggcatatgtttgcatagtgccttagtttcctattgctgctataaacaatgagcacaaacagtggctgaaaacagcaccgatttattctcttatgcttctggagggcggaagtctgagatctttttcactgaattagactccacatgtcacccaagtcacttccttcaggaggctctagaggagaatggctccttgcctttctcagcttctagtgagtgcctgcattccttggcttacagccccttccttcatcctcagaacctaccacatcattctctgctaccgtcatcacattgcattctcctctcactctgattcttctcccatccctcttataagcaccactgcaattatatcaggcccacccagataacctccccaactcaagatccttcacttatccacttcgacaaagtcccttttgcctcatgagctgatatgcgcaggttccagggattgggacagaaatatatttggggagccatcaccccgcctcccacacatagtaacacacctatgaacctcatagttccgttgcgtttgtgaaagtggtttctttcccctgcttcatgatgggcctatgtgtcatcttctggatgagctggctggtctgcagggttctgcctcacttcctgatcctgattccactgggatttgggtctgggtatgatgaagggtgtaggtgtatatgtgactgatttttattcttcatattggggagaaatgaagtttattttgctctcctccctcattctatatattgatattatgattaatagcttttgacaccaaactattttgaaatatgagtcttttatgacgtattttgacagcagcaatggcatgcttttcgctgttgtaacaggagtaaatgacaggggccactcgctcattattttatacccaagtaatcaaccaaagatgtcatgtccagaaataacactaaaatgtcaaccacccaaatctcttgcaaatagtctcattcagagggttggaatctgccttactggcagttttgaaagatacaatttgttgaagacagggagccctaagtgatttctttctctctccgagatgccagatgggtgttgaatgaagtccagtttttagtttttctgtagataatttttttaagtttgtggtggtgtttcggatcttcatccgtgtgttctccctcctctagccccccacggctacccacagcctggcagcggtatggttgccttggtacctgttcctgaaggctgtctgcaatgaaatttggttgtctaaatagcacgacttgtcatctaaaagtagaagtcattagcacgatgccgtttggctagtggtatcttgaatgctgttttaaaaattttcttattttatcactttactgttactgtttactcatgtcatcactggagatttcagggcctgcttcacactatggatccggagtgaaaaatacgaaatgttctccctaagagtttcccagaacttgcgccaaaaacagtggcccgagttggacattttgtatatttttagagacacagattttgaaattccagccgttgttacctcgcgtgatcagtaatacttgcatattggtagcggcaatccatgattgaacagccttctgctgtttctgagggaaatgaaatttctgccagcttctgtttgaactttaattggccttcactgtggtcgtgaatttgccagaaacacgtatttatctcagaaaaggtagcatgttttttaagtttgatataaaagttgaattgggtgctttgggaggatttgtgtccatttgcctccaatcaagttatctcctctgtgaaattataacaaaagatgcagccaggcggaacatcgtcactctttccgcccaggtgagtccactctgaagtcaatgactcctgtcactataggtaagatgggaggccacatcctgttcccttgtggtaggcatcttggcaaaaaccaccaactggcagcctgtgttgtgaggaatgcacattaattagttccttgaaactcttccctcattaacttcaggtaagttgttaaagcaaatgttctggagttcagagtgttgcttttgataatgagaaaacaagtttagtcatcagaatctgtcatcttgtttataaaacagtcaaaccatatgcaacgcccttctgcatggtggattttgttttgttccttgaacctactggctcgcttcatccaatgcctacagatagtaaataaagaggtccatttttttaggtacattaaatactacaaattttgggaggggaggtagagtaggagggtggtgggcagaaggcagccgggccatttttttggcaactaattcaatatgagaaaaaagatggtattgctctcataaaagtaatttatattcattgttttcaaccaactgaaacattcagaaagctaaaaacatttcagtcaaattcccaccaccttgaaataatcagaagtatgttttggtgaccatcattcaagatacgttcttggccgggcgcagtggctcacgcctgtaatcccagcactttgggaggccgagatgggtggatcacgaggtcaagatatcgggaccatcctggccaacttggtaaaaccccgtctctactaaaaacacaaaaattagctgggcgtggtggtgggcacctgtaatccagctagtcaggaggctgaggtaggagaatcacttgaacctgggaggctgaggttgtagtgagccgagattgcgccactgcactctaacctggtgacagagcaagactctgtctcaaaaaaaaaaaaaaaaaaagatacgttcctaagatagacagaaaggtaggtcaagaagcaggtaactatattgacaaatgaagaagcataatatttttaaatgtaaatttgaatctaagaaaggaaaatcagatgaagtaatttctgaacttttactatgtgagtccaagaatattaagctattacttcctaaaatattactgtaaagtaaaaataacaattattgacaatattgagaagttttatatgtatatacacatatatacgtgcatatgtatctacattctatgtatgttttatacatatataactgtattttaaactgtaattttcaaaatagttttgatagctttttgatttgttgcttatttggctagatttaattgccaagaattttatttttgtttatttcaaatatggtttatgttacatatcctttgttcctgcatactagatgccttagtccattttgtgctggtttcacaaaatacttgagactgggtaatttataaataatagaactttatttcttaccattctgggggctgggaagcctgagatcaaggagcggacagattcagttttctggcgagggctgcattccatctggtgacactgcatcctctggagaagagaaatgctgtgtcctcccatgacagaaggcagaagggcaagaggaatgaacttcccttcttaagccctgttataagcgcaccgaatacctttcacaggggtttaggtgtgcttgtaaacatcatgacttaatcacctcctgaaggccccccgctcaagatgctttcgttgataattaagtttgaacttgaattgtagagggaacagaagcattcagaacctaacacttcagagtatctgttcctttctcatttaatagataattcgtctaggtataaaaatctcgagtcaccttttcttttactggaatcttgtagatactgtctttgggcattgaatttccttaatgtgatactgggggctaacttgagttgcccacttaatgatgacttgctttctctgctaggatgtacataggattatttatttttatttattcatattctctctctcttctcccatctctactatatttattaaagcatcgtacatgtacacaaaagcgcatataacataagcttatagttcagcgaatgatcaacatgccaaaactcacgacaactattcaggtgaagaaatagaacaccactggagtttcagagtttcctctgatctcctttcagtcattaggcaggccttcctctctgctcaaaggtagctacttcttcagcttctaatatcattgacttttgctgttttgggattctacatgaacggaaccattcagtatgctttctggcttctttcactcaacattgcttcttgagattgatcccgattgttgcatagagcagtatttcattcattttccttgctcccatgatatgtgaattatctgtgtgtcagccctagttctcgtttgagctacttactggcttaagcaacagccttgtcacttttgagtcattccccactttgggactggcagtgaaatagaggctgtcagtgggttgatgagtgagcactatgtcccctccctcgttcctgtcacctccttctcggacagtaaagtcactgttcgtgattcccccttctgctcctcttctgccacgtgctgttagcagggtttctctggggatacccactgctgccccttttcttttagtatgttctcactcagatcttagccctttagccaatggctcatttcagtggtcttttaggacggagaaaaatctgtgtcatgcttgcrttccaaggagccatgtgttcattgctaatgccctccctcattttggtccagtttccctgtattcagctaatgttcattatagtttgtggtgttggagtaataaccatttatttatgaaaccattttattatattttattcttttctctttcacagtagattttagggaaggagaatatacagaaatgtttttgttccttcctgtttaactgcatgtctcagctgggcccggtggctcatgcctgtaatcccagcactttgggaggcgaaggcaggcaaattacctgaggtcaggagttcgagaccagcctggccaacatggtgaagccccgtctctactaaaaatacaaaaaaattagctggacatggtggcaggtgcctgtaatcccagctattggggaggctgaggcaggagaatcacttgaacccgggagatggaggttgcagtgagccgagatcataccactgcactccagcctgggcaacaacagtgaaaccccatctcaaaaaaataaataaaaaggcatgtctcataaattagcttaggaataagtgcatttaacaacccaggactgataatgtgaggattactaacatggtgaatatttaccatgttggtatatctctgcacgggtggactgagtttccttttggggccatctcagtcaccttcttccccctcatttgtcccagcgtcctgccctccaccctctagtccatcttcctgcaggcctggctgtccactgtcctgtgttagccctgacacctgccaagccatctgaagcttcccattcttcttggaggctgattaactcagaagaatgctttaaccagagggggtaaactatagtatgcgactagctttatgttcctttataggtttttaatatcagcgaatggagaattattctatactgcctttgagtatgagcttaatctcattcatcatcaaaaagcatctggaatctgccattggagctcttgctcaaatgcttgactgaactgtagggaggtgctttttgttctagtgtgtataatgtgtataatttggtgccaacatggcagccccttcagatcagagccataactttacagaaggaacagtatctctttaaaaatagacacaggtttaagatttaaagtgacagcaacatttttgagaaaattttttatctgaaggttgaaaaaacgttggatcttatataattaaagagaaatgtaacctttatgtctgactgtatctttgctttccagttcaccaaaatggtacccacagttgaaaacactcataagaataatgaagtcacattgcgatggactttgctctcccagctcaaattatgtgccaactaatacagcaaatcgtatgatatatgtgtgtatatatatatatcacatgatatatatgtgtgtatgtatgtctatatacatatacatatatgtgtgtatgtttgtgtctatatgcatatatgtatatgtgtgtatatatacatatatgtatatgtgtgtatatatacatatatgtatatgtgtgtatatatacatatatgtatatgtgtgtatatatacatatatgtatatgtgtgtatatatacatatatgtatatrtgtgtgtatatatacatatatgtggctgtatacatgtatatatgtgtatatatgtatatagacacacacatacacrtatatacagatatacacatatgtagtttgagttatataaaaagtgtgctcttaagacagatagcttgcttttctctaacctctattgtctggaatattgtctatttggcccttctgtaaatgctatgtagacccataatatccttaactttaattttggatttcttcactcatgagttctaactccatatccccaacctagctagacctctcacctgataccccagatgataaatcttattgcttggtggatattttcactttcatgttccagaggcacctcacattgtaacagrcctgaggttgggctcctccactcctcttgaattctgtgcttaggtcgatgacaccaccattcatacatccaccagctagaagcctgggtgtcagctcccatgcttcatcaaatccttttcctggatcagaggttcttacttttcatctgttttcttaaayaatattcccacctcattagtgtgggatatgttccaagacccccagtggatgcctgaacctgcagatagtactgaaccctagaaaaacagtactctgtttttctgatacatgcatacctttgataaagtttaatttataaatcaggcacagtaagagattaacaataataatcaaatagatcagttataacaatatactgtaataaaagctatgtgaatgtagtatctctctctcaaaatatctcttcatactggactcaactatttttggaccatgagtgactaaaaccaggaaagtgaaaccacggataagagagaactactatgatagtacagtggcagtagcaatagtcacggtagtaattaataatamaaatttctcttgtacttgctatgtagccggctttgttctaacagctttacattgatgttttaatccctyagtaaggtaagcacttataatccttatttttagatgaggcaactgagatgcagagagggtaaatatgaacttgtccaagttcatattgctagtacatctgggattctaatggcaatgtatggaaatggagaaggaataccagggcgtcgattttccattgcagttatcaagtgatttgccacccaygtctgtcccactcagaaaagcctattgcaatgcaagagaatgagcgtgataccattaaagggttgatcttggatctagtctaatttgtgaagaacattttataagtcactcaaccatcatgagtaacaaatcgctggggaagtggcttagrcctcccagccacatgccaggaagcctgtgtttggcaatgactgttgctctgtacagaatggctcaagtgttctattggaagcagytggaccttgtggctttcatgctgtcacccttgtattatttcttggtgtgtccaggtaaagctggagctccttagcccagccagaaaggcagctcatggtgcagcccctgcctgcctctctggactcatctcccctgcttccctgtttgcattgtggtttttgctttccgcctccagagatattggagactctgctgtattcactatgatctggttaagcatctcctccagaaagtcattccgagcctcttcactgttctctctacactgggtcaagagcctgtggtgttctcatgagctctttcttcagtatccatatgaaccactagaccaagagcacctgacggacaagttatttatcttcatgacacaaactgtactaatggaatgtttgtgaatgaaaatgtactttgatgaaccagaaccagatactctatttatttatttatttrtttgtttatttatttatttatgtgagatagggtcttgttcagttgtccaggctggagtgcagtggtgcagtctcagctcactgcagcctcaaactctcagggctcaggtgatcctcccacctcagcctcccaagcagttgggcccacaggagtgcaccaccatgcccagctaatgactgtattttttgtagacgtggggtttcgccatggtgcccaggctgtcatggcagccctaacagatgaatccagtggcatatgaaataactgctaagaaccatgtgatagctggatgggggtttgtstgtgcacatatgcacatacacacaagacatccacatgtgtgaaagagggtgttgcattccttaagagtagtatacttatttatgtattctgtgtaggatacttatttatatgagaaactctagcgcatgagaaaatgttgaacaagaatttaagaggattttctgtttaccctgagtttaactrtaaaattagagttcttccctaaatattattgttaatattatacatgttgttttttgctgtaaaatattcagagattatctaagtaattctgccactatctgtcatgatgtagtgactatgtgcatttctgttggacatttaatttctatttgataatttatttctgttcaatatgtatatttgtagaattatttctgagatatagatgttcattgctatccagaatattttatgtaataaactctatgttttctgtcataactatggttaggtactggtttagggataatcagccagttgccttgacyccaaagaacatcaagatttatttgccattgccactgtcatgtttctttaaagggaagagacggggaaaaaggaaagattggaaagagttgcgggaaggaaagcaaatgtcccttcagacatgtgattgtgccacataggaaggaacagaccctggtttgaatcccagccttactgtgtattgaccctgtgacctttgggagatgagttaatccttgcaccacattttccttggctgcaaagcacctcaatttgcaggttcctttgagggctgagattatatacataaagcatgtgggctagtctcctctggtgtatatatgcagaaagcattgtccccaatcttgaattgttagatattcatttaaggcaaacatttttgttttctttttccttactgaatgagagaagctggtaaggaaacggtgggatgtggccaggtgataggagcgcagacatagcagccattgatgcagacagagcttagagaaggcgtcatcaccacgcatcacactgagcaagtctgtgcggcccctgtgcccatgaggcttacagtgcagttggaaaagcagaccaaagggaataaacgtgaacaagataattgcaaaatatagtaagtactgtgaaacaaaccaatagattctgggagaaactaaaataagaaggagcaacttttagtggagacatccaggaggcgtctctgaagaggtgacagcaaataagttacgttttgggaagcagaggggagaagagggtattgggtaggtgaagaagcgcgacagcccatggtgtgtttgggtgatacaagtgagccaccattgtctgatggaaagggactggaaaagaaactggattgctgtaagaatgattttgaatgacattggggtttttctggtttgtttttgtttttgagatggagtttccctcagttgcgcaggctggagtgcagtggtgcggtcctagctcactgaagcctcaaattcctgggctgaagtgatcctcttgcctcagcctcctgagtagctgggactagaggcatgcgccaccacactcggcgaattttttatctttttgtagagataggttgtcactgtgttgccgaggcttgtcttcaactcctgccgtcaagcaatcctcctgccttcaagcaatcctcctgccttagcctctcaaagtgttgggattacaggcatgagccttacgcccagccaacataattttttttttttttttttgagatgaagtttcactctctgttgcccaggctggagtgcactggcatgatctcagctcacttcaacctccacctccagggatcaagcaattctcctgtcccagcctttcgagtagctgggattacatgtgtccgccaccatgcccggctaattattgtatttttagtagagacggggtttcaccatgttggccacgctggtcttgatctactaacctcaggtgatctgcccgcctcagcctcccaaagtgctgggaatacagatgtgagccaccatgccgggccaccactttttttgttgttactttattttacaatttttaaatacagttgtataaaatttgagccatgagtctgaccattctgagaaggcctacttttgtttctcctaagatgtgccatttaccgttttaaattgtcatcattggctaggggacctggctctccattagattagaggacaccatttgttcacatttgttgatgtcagactactaccaaacaaaaatttttgcccttgtgaccatctctttgactttccagatcaggataatcaaataaaatgataaatacaaataatgtataacatgtcacatatagtttatttactgcctaaggttgttattttgtgtttaaaatgattcttgctactgagtataaattctgtgtacccttttttgatgtcaatttttattatattaatgctaaggaatattagaatagtctggaatttgggaattgatagtagcaagctggaatttgggtatggaaaatgctgtgtaaaccagtagcaagaagtgccaatgcttggagtcaagccagggcccagatattcaagctctatttctttttcttttctttctttctttcttttttttttttttttaaataaattgagctttggaaacaccttcacatttgaaaatgactttgtgtttgttgattgttttctttcttgagtagagtatcatagtactttctttttttgttatttgttactgtgacagtatttcatatttttaacccaagacagttggctttccaaaaatactggaaacaaatgcatgatgtaatcatcctcacccgcgtccaaaattgtggtagatctccactttcactctgttatttatagtaatgcgttttttttgtgttaggactggtaagttgcctaagtagatccttgagaggcgggatagacattttttcccttgagtcatatagttaatttgctttcatttttcttgagtcctactgttaaatttttgaagtacaacagtttatgtccttggtctgtgcttgactgtggagtaatactagacaataaggcatcctttatttatattagctttggtatgttgtttttgcttttctcagatttctccagtcctaaagaaggttatgtacatttatctgtgtgtttacatacatggttatatggaaataattgctttcagatagttgtggttttcttttcattgtttcttctgaaatattcttgttaaacctgagaacaagtgaaaatgtttcatgaaaatgcattaaaatgcattgttaatatataacctaaaaactattggattggtttatttttagcatgaagaattttgaattcactggaatttaagttacagttgttgcagtttttatgtagacttggcagttatgtcacttatacttcttaattatctttgtacatattttatatgacataatatctgcacactcaccatctccagcctctgtagagaatgtaacacatagcaccaaagtaataaaaatataagccccagagcgggaagcaaagctgaaacaagccatttttacatataacttaagtttaggttctgtatagtaggttgatcccttacttaacctttaataaaattggattcaagggtatttatatgtaaataaaaaaataaagttaatttcgtttcatacttccctatgagcaagtgtctagtaatatattacaatgacatttaaacttcagtatttgtcctattggctgaaaaaattcccatacttttttagcaacagggtttgaggttagacattaaaaagggaaggttcttaagatgaatattaagattacgtgatcatatgcacagtgatgaaatcagtctgtatttgtttgacctcttgtctcctatgaaggtatctaagaagtcatttcctcctattacatattttagaaattaaaatttaataacgcttcataccctccaaacttctctgaaagggctctttagttgtacaggcatctagatcatggtcagactccttttctaagtaatgttatcaatagtgtatttgtatacgtggttatagatcaaaggttgaaatacgcttatcagtgcctcctgaagaggcagtcccctggagtcttcttatctcacctgatgagtgtggtcttttggtgctcatatcatgtatggaaggaggtrgcagggatcaggagggcatatcccctttgcctctcattccctacccgacttcccagagaaagcagcattttcaaacttgcagaaatatgtgagggctctcagaactgcttaggatcagccatgtacattgtgaaaagtgagtcatggctttttctctgcaatagtgtagacgtttctactcttaaaaataaagatagattaaaatataacacctcaactccaagagctccaagcctcccacagaacatcgtagtcctgctacactcagttgaacatttatgccctggccctggcacccacctcccttagcctgcctgtgaaggcgtctctctgatgccctatctagacccgttcttccttttcctacatttgaactttttctgagatagtttcagtttccataatctctgtgtgatgattttcatcaagaattccgactaaggagattttattcttttaagaagatttgttcaacatatacttacatgagattttgttctttttaaagactgtgtaaataaattatctgattaagaaaaatttttctactttgttttgactcttgaatagggaaatgcttgcctatatttaaatgcaacctgctaaaaatacttgttctgacctattagtgaagtatatcacactatctaaagcaatctgtagatttaatgcactcgctatgaaaatctcgctgatgttttttgcagaaatagaaaatcccaccctaaagttcatatggaattgcaacagacctcaagtagtcaaaacaaccttgagaaagaacaaaactgaaggatttaacaattcctgatttcaaacttgctacagttccagtagtcaaaacagtgtggtactggcctaaaggcagatatattgaccaatggaatagaatagagaccccagaaataaatccttgcctaaatggtcaagtgattttttgacaagtgtgcccaaaccactcaatggggaaaagacagtcttgttaagaaatgatgaagtgaaaaactacatargcatatgcaaaagaatgaagttggacccttgcctaataacatatagaagaattaactcaaaatgaataaaaaacctaaatgtaagaactacaactataaaaattttaggggaaattgtaggataaaatyttcaagacgttggactttaagatgacttcttggctatgacaccaaaggcacagacaacaaaagaaaaaataggcaaattggacttcatgaaaatttaaraattttgtgcatcaaaagacaacatcaacacaatgaaaaggcaacccagagcaatatggccaatgagagttgcctagtgctcatccctcccccaaaaggggatctaaacaacaagtaaacaactatatttcaactagagtgacgaggaagtatgctggaccgcactaggggagcagcaaacttcctgtggtgcatggaaggccaggacagcaccatggacaggtgagcgaggcatcctgcctctgccacagtctcccccagtggagacttggcagtcatggggtgctgtttatggggaaatgtatgctggtgattcccagcagtccccattgccaccagaaatgctagcagtctttgatataggagtcccctaaacttcacaggcccccaatccagtttggagagtagccgggagctcacacagatgcaatgcctcagtgtccacrttgaggacccgcaacctaagcagcttcaactctgtcccatcttgaacctttcccactgctagagtgcatcctgccctgcgcaccagtagcaattgactcttttcatcctggaggcctagctgtccttataccacattcacacaggtacctgcagcactatgaccatagctacccaaagcataggtcacatggaatgactgagaccccagtgttcaaacccaagtgacacaccacatccccccaccccccagggaacaggcagatctgtacggtgctgaagtcactgaacagtcagccaattacctctcctgcacgtacctgcaccatagccacctgtcccaccaagcgcggtgcatccatagctggtccaactgttggtcctgtggcagcctcgttcccgcatacagacacccaaagagcagctgaatgctgctattctatgtctagcctgacagctggtccagtagcagccctccctcccaaataactgcaaggctgcccaaccccatttcacactggcatccagcccaagagctgggccagtggtggacctgctcctctagacagactcctacagggccacctgamacagctgcacctatgtgcagctggcacagcatcagaccagtagactcttcatccatcctcttgaagagacagccacgtagctgctcagctagccacacccatatgcacctaagctcagcccaacagccagactagtggtggccccacctccctgaaaagcctgttggagagccttttcgccctccacacccatacatattcagcccaacagccagcccaacacccctactcccagcaaaaccacacactacgaccaccacaaatacctacagcataggccattgaggcaattgcagacattgctgatgaagattgcagctgaaaaaactacatgtagaccatgctactgagtccacccagaactaaagctaactcaccacactcaaatgacaccttgggacctatctacaggaagaattatctcctaatgaaagttacttcataaacctggaaagggtcactattccactagatgttcagatatcagcatagggacacaagcaatgtgaaaaagcaaggaaatgtgatacctgcaaaggaatacaataagtctttagtaaaagaccccaaagaaaaggacatttatgaaatgcctgaaaataagataatcttaaggaaactcatggagatacaagagaatacagcaaataattcagtgagatcaggaaaacaattcatcatccgaatgagaaatgcaacaaagataagtgtcataaagaaccaaacagaaatcttggagctgaggaattatgaatgaaataaaaagtgcaagtgaaagcttcaacaacagactagatcaggcagagtaatttctgaacttgaagacaggcctcttgaattatcccagtcagagggaaaaaaaaataagaattttaattgaagaaagcctgtgggactcatgcgataccattaaatgaacaaatgtgtgcattataggaacttcgtagggagaagagttggagaaagacacagaaaacctatgtaatgaaataatagatgaaaacttccctagtcttggcagaaatacggacataggaattcagcaagttcagaggtccccagttagattcagtcctctctgaggcacattataatcatactctcaaaagttaaagacagaattttaaaagccacaagaaaacagtgtcacatcacacacaagggaatgtccattagactactagtagatttctcagcagaaaccttgcaggttagaagagaatgggatgatatattcaaagtgctgaaagaaggggggcttgtggggaggaggaactgtcagccaagaatattatatccaacaaagttatccttcagaaatgaaggagaaataagaccttttcagacaagcaaaggctgagagaatttgtgaccagtaggttggccttataaggaatgcttaagggagtgctaccactggaaaagaaaggacaataattatcatgaaaacatgtgaaggtgtaaaactcactagtagaggtaaattcataaaatactctagtgatttaatggtcctatgtaaatctctcaatcctctagtatgaagacttagaagtcaaaaaggtcaaaaacaacaacaaccacacttagtggctacaaatatataataaataagtagattaaggcaacaaaaatattaattgtgtatggggttaagtctagaatattttcatgcaaccagatttaaattgctatcaggttgatgtagtctattgtaactacaagactcttatgttagccccatggtaaccacaaagaaagaaattacgacagaataataaacagtaaagagaaagaaaacaaaacttcgcagcacagaaaaccaccaaaccgcgaaggaaaataacatgagtaaaagaaaggggaaaaggatctacaaaacaagcagaaaacaacaatatggcaggaataaatttttattgatatgaccttgaatataaatggattaaagtctcaaatttaaaaacacagagtggtcgaacaggttttaaaaataagacccaactatctgctggctacaagaggctcacatcatcattaaagacaaacataaactgaaagtgaaggaatggaaaaacatattccatacaaacagaaaccaaaagtgagcaggagtagctataattgtatcagataagacagattttaagtcaaaaactggaaaaagaaaaaaggtcattatgtcatgattaaaggataaattcaataagagaatattgtaacaaatacatatgcactcaaccctgaaacatacagatgtacaaaacaaacatgattgcacataaaggtacagatcaactgcaatacaattataaaagggaagtttggcaaagaaatatcagactaaaactacatcaaagacctaatgcacctagcagatatttacagaacattttaacagctgcagaatacaaattcttctcaattacacatgaaacattctccaggatagagcacatgctaggccacaaaacaaatcttaacagatttgagatagagatcctatcaagtatcttttctaaccacagtggtatgaaactagaaaacaacaacatgagcaactttggatactttgaaatacgtggaaattaaacaacatggccctcaacaaccagtgggtcaattaaattaacagagaaatgaaaaattgctttgagacaaacaagaatgcaaacacatcttaccaaaacctgtgagacacagcgagagagcagttctaacagggaattttatagcaatacacagctacattagaaaagaagagagatttttaatgaacaacctaatgacgtaccacaaggaactagaaaaacaagaacaaactgaacccaaaattgatagaaggaaaggtagaataaggctcagagaagaaataaagacaaattaacattcaaaagatcaagaaaacgaagagttggtttttttgaaaagataagcaaaatcaacaaactttaagctagactaaaaaaaacaagactcaagtaaaatcagagatggaaaaggagatgttacaactgatactacagaaatacagaaaattatagagaatattatgagctgctatatgccaacaaatttgataatatggaagaaatagataagttcttggacatatacaaactactgagattcaattataaagaaattaaagatctgaacagactaataactagtgagacaattagttataaaaagtctttcctggatagagaaaatgtggcacatatacaccatgtggaatactgtgcagccataaaaaagaaagactttatgtcctttgcaggaacatggatgaagctggaaaccatcattttcagcaaactaacacaggaacagaaaatcaaacattgcatgttctcactgataagtgggagttgaacaatgagaacacatggacacacggaggggagcattacacactgggacctgtcggcgggtagggggtaagaggagggatagcattggagaaattcctaatgtagatgatgggttgatgggttcagcaaaccaccatgacacatgtatacctatgtaacaaacctgcactttctgcacatatatcccagaacttaaagtataataaaaaataaaaaaatttaaaaaaaatgtttcatcaaagaaaagcttaggacctgatggcttcactactgaattctacaaaacatttgaagaagaactaataacagttctcctcaaactattccagaaaattgataagtggggagtatttgtaaaattttatgaggccagcattaccctgatcctgaaaccagacaaygatacaacaacaacagcaaaactacaggtaagtatctgtaatgtgaacatagatgcagaaattcttaataagatattaacaaactgaatccagcagcacattaaaaagatcattcactgtgatcaagtattactcataccagtgttgcaagggtagtttaacgtatgcaagtcaataagtgtaatacatcacattaacaaaaagagacaaaaacaatatgatcatttcagtagatgcagaaaaagcatttgacatccttcaacattctttcataaaaactcaacaaattagttatggaaggtatgtaccttaacacagtaaatgtcatgtatgaaaaacccacagctgacatcatactgaatgaggaaaagctttcttttaatatatggaacaagacaaggatgccaacttctgctacttctgttcaacatagtactggaagtcctagcctaagccattagggaagagaaagatataaaaggcatccaaattggaaaagaggaagtcagattgtcctgtttgcagacatgatcttacatatagaaaaccgaatgggagaaaattttggcaaccttctcatctgacaaagggctaatatccagaatctacaatgaactcaaacaaatttacaagaaaaaaacaaccccatcaaaaagtgggcaaaggatatgaacagacacttctcaaaagaagacatttatgcagccaaaagacacatgaaaaaatgctcatcatcactggccatcagagaaatgcaaatcaaaaccacaatgagataccatctcacaccagttagaatggcaatcgttaaaaagtcaggaaacaacaggtgctggagaggatgtggaaaaataggaacacttttatactgttggtgggactgtaaactagttcaactattgtggaagtcagtgtggggattcctcagggatctagaactagaaataccatttgacccagccatcccattgctgggtatatacccaaaggactataaatcatgctgctataaagacacatgcacacgtatgtttattgcggcactattcacaatagcaaagacttggaaccaaccgaaatgtccaacaatgatagactggattaagaaaatgtggcacatatacaccatggaatagtatgcagccataaaaaatgatgagttcatgtcctttgtaggtacatggatgaaattggaaatcatcattctcagtaaactatcgcaaggacaaaaaaccaaacacctcatgttctcactcatagatgggaattgaacaatgagaacacatggacacgggaaggggaacatcacactctggggcctgttgtggggtgggggaaggggggagggatagcattaggagatayatctaatgctaaatgacgagttaatgggtgtaacacaccagcatggcacatgtatacatatgtaacctgcacattgtgcacatgtaccctaaaacttaaagtataattaaaaaaaaaaaaccaaaggactctactaaagaactggtagaactaataaatgaattcagtagttatgggatacaaaatcagcatacaagaatcagtagtctttctatatattaaccattattaatattggttcattaactatctgaaaaagaaatcaagaaaacagctccatttacgatagcttaaaaaaaaaaagataatagaaacaaaaccaaattgaaagctctctatattgaaactctaaaactttaacaaaagaaattgaagaggacacaaataaatggcaagctactttgtcttcatggtttggaagaattaatatagttaagatggccatattacctaaaataatctacagatttgatgcaattcctatcaaaatactaatgacattctttacacagatagaaaaaaaaatcctaaaattcatatggaaccacaaaaggacccaaatagccaaagcaaccctgagcaaaaagaaaaacctgcaggtatcacaccaaccaagttcaaaatgtacagttgactcctaaagaacttagatttaaactgtgcaggctcacttttatgtagattttcttctgcttctgccacccctgaaacagcaagacaaatccctcaacaggaagcctactcaccaggaagacaatgaggatgaagacctttataatactccacatccacttaataaataataaatatatttactcttccttatgtttttcttaatgacattttctctagctttattgtaagaatatagtatataatgtatgtaacagacaaaatatgttaattgactatgttatccgtaaggtttctgatcaatagtaggctattaatagttttttgggggaagtcaaaagttgttcaagggtcactgctactacaaagttatgggaacctaaacatgttactggctttaaaaacagacgcataaaccagtggaacagaatagagagccgacaaataaatttacatacctatagccaactaatttttcataatggtggcaagaacacacattaaggaaaagacaaatctctttagtaaatggtgctgggaaaattggatatcaacatgcaaaagaatgagtctagacctctacctcttaccaaaaaaaagaaaaatcaaaacagattaaaatgtaaatgtaaaacccaaaactatgcaactactggaagaaaacagagaggaaacttttcacagcattgacctggagaagggttttttaaacaagacttcaaaagcagcaggcaacaaaagcaaaactagacaaacaagattacatcaaattataaagcttttgcacagcaaaggaagctattgacggagtgaagaggcacctaaagaatgagagtaaatatttacaaagtatgtatctggcaagaggttaatattcagaacataaaaggatcataacagcaaaaaaaaaaaaaacctgattaagaaaatgggcaaactaccttaatagacatgtgtcmaaagcagacatacagatggccaacatgtatatgaaaaaatgctcaacatcagtaatcatcaagaaagtgcaaatcagaaccacgataaaataccacctcactccagttagcatggctattgttaaaaagagaaaataagggttggcaaggatgtggagaaagggaaacacattgttggtgggattgtaaattarccattatggaaaagagtatggagatccttcaaaaaattaaaaataggactaccatacaatccagccattccattactaggtatatatccaaaagaaattactatgttgaagagaaaacttcaactcccatgtttattgcagcactgtttacaataactaagatacgtaatcaacctaagtgyccattaatgcaagaatgaatacagaaaatgtatatatacataatggaatattattcagccatgaaagtatgaaatcttctcatttgccacaattggatgaacctgaaagaagtcatgttttgtgaaataatccagacacagaaagacacataacacatgatcccactcatatgagatctttttttcttaacaacaacaaaaacagagttggtatccttgaaacaggaagtagaatagtggttaccagagactgggaggggmgggaagagatggaagggtgcagagatgttggccagtgggtacatagttacatttagacagtaggaataaattttgatgttctgttacacagtagastgactgtaattaacagtgaaatattgtatattaggaaacagctagaagagaggctttcaaatgttcccaccacaaagaaatacgtgcatgaggtgatgaatactagccacccagattggataattatatagcatagataggtatcaaaacatcaaattgtacccccataagtatgtataattccactgtgtcaattaaaattttttctaaaattttctaaaattattttttctaaaaagaccacccacggaatgagagaaaatatytgtaaattgtatatctgataaaggattaaaatttagagtatatagagaactaaaactcarcagcagcaacaataaaaaacacaacccagttgaaaaatggcaagggacttgaataactttttcccaaggaaggtacataaatggccaataagcacatgaaaaaatgttcaacatctctagtcattacggaagtgcaagtgaaaactacaatgctatataatttcatatccattagggtggttactataaaaaatttacaagtattaaaaagatgaggttgggaacccttgagcactgttggtggaaatggaaaattgtatgacagtttctcgaaaaattaaaactaccatacgacccagcagtttcacttctgagtatattcccgaaataattgaaaayggtctcaaaaagatatgtgtacagccatatttatagcagcattgttcacagtagctaaaatgtgaatgcagcacacgtgtacatcaacagatgaatggataagcaaaatatggtgtttacatttggcccttcgtatccacagagtctgcattcatggattcaaccaaccacagatcaaaaacatttgggctgggtgtggtggtgtgtgcctataatcccagctactcaggagactgaggtaggaggattgcttgagccaagaagtccaccaccagcctgtgcaacagagacagcatctctcaaaaaaggatcagccaataaataaatacaatgtgtgggggctggatgcagtggctcactcctgtaatcccagcactttgggaggccgaggtgggctgatcatttgaggtcaggagttcaagaccagcttggccaacatggtgaaaccccatctctactaaaaaatacaaaaattagctgagtgtggtggcactcgcctgtagtctcagctacttaggaggctgaggcaggaaaatcgtttgaactgggaagcagatgttgcagtgagctgagatcacgcctctgcactccagcctgtgtgacagagcgagactctgtctcaaaaaaataaataaaatgcatggggaaaaaaaacaaaaatagcagaacaacaattttaaagatacatattttaaaatatagtataaaatcatttatgtcacatttacattgtattataaataatgtagagattatttaaaacatacagaggatgtgtataggttatatgaaaatttacactattttatatgagagacttgagcatccgtggatttttgacatccacaggggtcctggaacctgtcccccatggatactgagagatgactgtatatacagtggaatattagcctttaaaagcaagttaattttgacatatgctacaacatggatgaaccttgaggaaattatatgaagtgaaataagccagtccaaaagaaaaaatgctgtgttattccatgtatatgagatacttagaacagtcaaaatcacagagataagcggaatggtggttgccaagagataagggaaaggagaaatggggagttattgttgcatggttttagaattaaggttttacaagatgaaaaaaagtcatggaggcagatggtacagtggtgtttgcacaaaattacaaatgtattaatatcaccaaaccatacccttaaaaatcatgaaaatgataaattttatcctatgtgtattttaatgcaaataaaaagtgggggaaaaattaaccagtcaactaacaaaagcagagtattttattttttwaaaaataaccaatttaaagtagaaccaaaaaaactaatcaaaaagaaaagaaagtgtattcacctaatgcattaccccactagggtgttttaatttaaaaataaaatttctgcaggtaatagggctttcagcccaaagggaatgattctgatgacagaattctgggccctgtgagggaggtgagtgacttgtttttgtgtataactccccagtgctcctaaatcatctcacattattgattataccaacaatattcmataccttttgaaaggagggagaaaatctgttaagtgtcatgtactggaaagaccaaggcctctgaaagagccagataaattggtttttaaatacctgcctggctgcctactagtcacatgaccttgagtatgaatcctaaacccccaaaatggtagttgctgcttcttaattttaagatgagatcataataatgccttccatgcaagattattgtgacaccctggaataatgtatgcaaagctcctgaaatgacacctggtacatggtacatgtataacaaataaaaaccaatattattatgataatgatgattctccagttggtaggtttttatcctttgtagaacttgtgatagtatctaaaaattcagatttctttttcagtactcaaaatagatttaattttttcttttatttaaaattttaaagttctaatgttaaaaattttatccttgtgaaagaaaagggattttcttttagagtgtggtccttcgaccagaaacaccatcatccactaagaacttgttagaaatgcaaacactagggcttcacccaagacctatgaaactaaaaactctgaaagttgtagtcactctgtaaaaaatattctgatgcacactcaagtttgagaacgcctgcttcaataaatctgggaaacagaaaagggtagcatttatgatctgtcatccaaaaataaccactttaaattctgagatttttttccagtcttttctctgttcatatgcatatacacttatatgtgtatttcttctagtctttttcctatacacctgtgtatatatttatggtgttttaaaaagttaagatcatgctgtataagttttacagccttcattttgaccttcaatattatgtcatgaccattgccccatgtcattaaattttatttgaaaacatttttaatcatatggctacatattataccatgctctgagtgtctcataattatgaaccaaccccctagacatctgagttgtttctagttgttcagaaggacataagcaacactcagttgaaaatctgtattcataaatcattgttaatatgagtgattatttcctccgcataaatttattactagggtggaattaccaggtcaaacagtatgaacatttttacaactcttaatagaaatcgccagattgcttttcagagaagaggtgccagtttggattctaaccagcaatgtagggaaaatgtttgtccattcctctaacacaaccaacgctgctgtattagtctgttctcgcactgctataaagaaatgccttagactgggtaatttataaagaacagaggtttaattggctcagagttctgcatggcgtataggaagcatgatgctggcatctgctcggcttctggggaggcctcaggaaacttaaaatcatggcagaaggcaaagggggagtgagatgactcacatggtgggagcaggagcaagaaaggaagtagggaggtgccccacacttttaaacaactagattttgtgattactcgctgtcactagaacagcaccagagggatgttgctaaatcattcatgaaggattactcttatgatcctgccacctcacaccaggcctccctccgacattgaggtttgcagttcgatctgtgacttgggcagggttgcagatccaaacgatatcattctgcccctggcccctccaaatcttgtattcttcttacattgcaaaatataatcatgccttcccaactgtcccccaaagtcttaactcattccagcattaactcaaaagtccaaagtctcacctcagacaaggctggtcccttccacctgtgaacctataaaataaaaaataagtttgttactttcaagatagagtggaggtataggcattgggtaaatactcctgttccagtagggagaaattggccaaaagaaaggggctacagctcccatggaagttcaaaacccagcacggcagtcattaaatcttaagacatcaaaattatctcccttgactccgtgttccacatttagggcactctaattcaagagatggccttccaaagccctggatggctccctgtggccttgcagtgtttagctcctgtgactgctctattgggctggcgttgagtgcctgcagcttttcccggtgcagggttcagcctgtcagtggatctaccattctctggtctagaggttggtggtcctccactgatagccccagtaaggcggttcctcagtggagactgtgtgtctgggctccaaccccatatttctccttcacactgccctagtagaggttctccatgagggctctgcccctgcagcaggcttctgcctggacatccaggcttttccctacattctctgaaatctaggcagaggcttcccgtcttcaattctttcactctgggatttgcccaagtcagtgaatagttcttgagatcaggagccagatccaccagagttttgtccattatgtcctaacattacctgagcaataaaaaggaaatctggcaaggaaaaacaagattgcctcccacatttagaagaatgattgagaaatcctaaatgaatgccaggtttaaaacataaattatttacttaacagccatttcaacttgcaacataaggcaaccttggaggtgactgttgaggatggcactgttctgttgctggttaattatatttataagcaactgagagcttcttctatcccttcttaacctggaccacagatatcaaatggccaagaagagcatcagatggaagcaatgtaaaatgctatttttcttcattggcataaggacttctgggcctcttcacaccagcacacacttaaatcaggtgctgcttgtgttggaacyatttggtagggtggtggttttctctttttaaatctttttgtgtgtgtgtgtgtgtgtaagttgtactatcttccccgactagatccgaagagtagccgtttattttagtatgtatcttaaagcagcaatgcaatgcatgcattaaatgtacagaatgcctcttttaaaaatgtgttgctggaaaggccaagcagacagttgccggaatgacagtgtggccttgcattccccacagaataaatttgagagctgtcatgagacatcccagcttacattgcgttgatgatgtacagaaagaaaagcaacytcagacctagattctcattccacttaggtttttagaccgtcatctattacgcagacagaagagaatgggccacaagcgtgatgttcactgcaataggctatacttaaattaaaggatactgttttgtaccaattagtgtgcaccatgtgcttttaatttgtttttgaccattccctttcaatgtactttaatcttttttaattatgagaataatccatactgttaacatggaattctccaaatcggtaattaatgtttatcctttgctctgccagttcaacctcctgccctaccttaatttgagaaaaccaacattaatatttcccttatttgagaaaatcaaccttaaaaacttaatattatccttttcttcttttacacataaacatttagtcatatacatatatggatttctactgtattttttcaaaaattggttgatagcaagcttggtagatcctcattgttttaattatagttacagacctccctccaggtcagtgcatacaaataactctgttttaataactgaatagcatttcacagtatggctatagcacattattctgcttatcacctggtaatgaaatttccggttgtttacaatgtttagttactgccgacactgtctattacaatatgagcattttataggccttctgatcattttccactcagtaaagtgtgttcctaaagaagtgaaaaagtaggaactttccagagtcggccacttgtctgtaatcatgcactgctataattagtagcctagcacatgataatgagaattatggagacttatgtgtagaatctttgtctatgtgggagagtccctaaatgtagcttttattttgtatcggagtcatttgtggttagcttccatgtgaggattcgccgcagagaagaggtgatctttcagctgttattatgtcccatctcgatcctttctgagcaaatcaattgcttggttttggagaaatctagtatagtaatgatgggctatacccaatcagccacttttttttagttttaccttgttagaccacaatcttagatatttatgagtgaatgagagagcgtggcttttggagtgcattaattttaaaaagctctctgtggtactattttgaaattaggaagggagggaatgctactttgatgacgtgaaaaatttgcccagatcgcctcgattgcttactatgtgataaatggtgccgctagccacatgtttcaggattttgaatactcaggaagaattcttagagtgtgattatggaaacaaccaatttccataagtgaaaatgagcatgcttattaatggggctgcaattgtctattgcattcagtcacatttataaccagcaaggagaatgagtgttttgcatgatttaatgtttacacaattgcagttgcatggcaaagcttgctgtactagaggctttggaaagaagcatatgtggtcgttttgcaggtaataaaatggaaaatccaatttgcaattgcagaataagcctctgagtgatatacgatcttcatagcagcatcggtcagagggtcactgctaatcacggcgctgcctggcttccccagtggcctgcgccttccaactgaggagtgagcaaagtgaatctgtgtctgggagccagccagcgtgtctgtagatgcaccactttctagcttattagatcctctttgtcacagtgcttaatcctgctgcctgatccttgttagaacaccaccagagcgccgctcagccttctaataaaggggatgggtgagggctcctaactcaacgcactgaagcgtgtggcgtcagagcgattgcaggctgactgacagcggggtgagatgcttcctgcatgttattacttaaaagggaacctacctccgacagctgacagacgagctctgccgaggcaatggtaacttgttgctaggccaatatgagtcgggtgtcatcttttcacacaatataatggccagctttactctaattatattaaccctcttctgaaattgcttcatccccaactggtgcagagtgaggcaagagaacccagagacaaatcgcttgctgggagggttgcagcgctacagaaacaggtattgtgttatccaccggtgacattaagttgaaaaacaaaacaagcatgccctattacagcaagtcccagttctaactccaaagagacattgctctgtttcgctcgcgcggtttccatttctgtcatttataatagtttcctcctttaaggtttgccacggacattatacctgggtttcatggctctttgttaaaaagaaagaccaacatcatacaagaagcttttttcttttcttttttttccccagggaaccctaatcattcttttctattaggctcttaagttcatgtagctttaggaagcacttggggatttaatttagtagcattgcttgatactgaagtaagtaaatgagggtggggagggtaacccagtcatctgtaccctccttgccactccccatcccagctaaaatatgcagatgggttggaagtgatataagtgaagatgatcgtgaatagcctgtggtcctttctgttaactctgacttgtagacatcagcgtgtgactccttttcccttaagggagtatgtctagctygcatccagcgtctcctgtgtgctccagttagcagccatcattagcaatctgtgatgcctctgccgtctccactgacagcacctaaatagagacatcacttgggattgacagatctccagggggttacaggcttcagacaaaagggcccagagaacatggctgacctttcttggcattattctccttccatgagtggcagtcagggagcatagaactttagtacattattttcagaggattaccactgaaaagactgcacacttagtaagatgctgttaataagttaacaagaggctgtgtgcgttccagagtggttttgcaggccgtcagtagtagaacacgagtgcttctttcccgcagaaatacgtccctattccttaagttcaaggaggggtctttaaaaccagctttactcataacataccttcagtttcggatgatcgagcaaggcttgggactcggcggaagggagcttgtgatgcaggctagaaaagaggagtctyttcccctcattatcccaagcaagtcttcccagggaaaatttgaaatagctgagacttgtgtgtgtcatccttcccggatcctttccctgctccacgttgttytcatgcttgccaagggccctgaaaatacagtgtggtgagaaatgctgctctgtgcccaaatgtagctgacttccctcctcttctccctcttcccaaagtaaaaaaaaaaaaaaaaaaaaaaaaaaaaaaaaggtgtgttcctgcaatcacccctctgaaccagatgttaaaagcaaagcagttgtgtaaatgattgaaaatcctggacgcttcttcaacagagtaaaattctaccaactagaagttccgactatatttctcattaggataaccaattttgcagaagaaggaaagatatttaggggaaaatactcactaactagaaaatccccttagcttaggaattcatttctgtgctattccataaataygtagtttatacttttcatggcttctgctgcttttttttcatctactttgcaatacacatattttttctttttctttttttttttttaagacagtcttgctctgttacccaggctggagtgcagtggtgccatttcggctcactgcaacctccgcctcccaggttcatgcagttctcctgcctcagcctcccaagaggctgggactacaggtgcgcaccactgtgcctggctaatttttgtatttttagcagagactgggttttgccatgttggccaaaytgccttgtggtctggaactcctgacctcaagtgatccacccgccttggcctcccaaagtgctggcattataggcatcagccaccactcctggccaagaatacacatattttttccaaacacctcaagtttatttttttcatagttgattcatgctgatgtctgtgggcagagattagaggcatgaagatgacaagatgtaagcataggttgtttctcaggtgaatgttttaagagagatatattgagctgcagcactaccattcccagctgatgagggcattgctgcaccgtggtcactgttgtccagtttgtaaccccttcccttactagtcctgcctcctgtgcacaatgggcaacataccatcgtgcacataaaatacgacacatcagaaatagacttgtttttaaagggatggcttctttccaggaatgtatattatattcatttttaggaaaaggaaaaattagagaaaaaaaccatgaaggaattatatggaagacaagataaattgagtgcagcaaactagattttaagaggaaataagaattatagagaaatgtaaacaaggggtcagtttcattcttgggactctaaaaaccccctccctaagtaaagataaaaacaaagatcaatggcagccccttgccaacaagatgaaacccaggtgagatactcagctaagcagaatgcataccacccctgggttttcattcgccctaggcagctttctgactcatggtttagagaatcaagctcactaatttcccaagtgacttaatatctgactaacgatgtttaaccattaagatgaggaaattgacaatattgataatcttggagagaaatggatctgcttatttttgtaccaagcgccaacaaattcttagtagctttggaaacatgatgaattactctctcttgatatttagtagtgtgtattttcttaaaaagattttgtgaaattgtagtcgtttttcttttgtttttctgaatagttgcaagttcatagaacaaaaaggaaagattcaaagtatctattattttgttttaacaagcaatattgcattatcttcctcataaaaaaattcatttatcctttcatttccaaagctcagatcagctaggcaatgatttgctttgtacttgcgtcccaggatatgttttcattgtcctgagttaccatctatgaaaacataggcagtagaacctgggaacagcaacagcacgtaacttcggttgtgtcttagcaaaaatctttgctgtgtctctaggttcaaacagtaccaggccatggatgagaagtgtgaaaattgatttcctcagtaggacttttagggacagaccttcacatatatccctgctgcctaacttctctttctctgcttcttgctttcataggcgagcgcattttaggaagttctttcacactttgccttttccatttttgaatatatcaaaaagaaaaaaaaacagtcaactggtcattaacagaggatatccagatgaggggtgcttgctggcttttttatgctaccttcattaaatcaaccttatctaaattgatatgtaacctgatggcctcaccagacactgtagaaggtgtatgagattgagcatcagcttgaaatcttcatgctggctttttctgatcttgggcatattagttaatttccttaagtttccatttcttcacctataaagtaatattagtatctgaccttccagattgctggagaatgaaatgaggaatgattttaaaaggtaattagtctttatcactgccatgttaatgagattcatttagggctgattccragatgtgcttatgctcttatacttgagtaacaacggtttggcttgggtaatattcctgtctttctccattcatacgctgtcttgattggtgaaaaaagtggtgttgatcagattgggcccagatcagccaggacaaggcatgatgcatactgacatggtcaagatagaattttaaatggttttcatattatcacttctcttaattttgaacaagtcatttttgtctctgcagcaaatacctccttccctctgctctgctttccttttccatctgtcttctttcttccttcctttgttcttaatttctggggccaaggtactgtcatgactgtgtacctgtgatgacttgggttaagaaattkaaaagacatcaaatgatccaagaggcacttagggtttgatttagggtacttaggctgtgattactgagaaggacttcttagacctgatctgtattggatgaagtgaccttcactttttyyyyccccccccccaggaaacttggatttaactggccagaagcaggtattcaaagcagagaacaatccctgggtgacccccattgcagaccagttccagcttggcgtgtcccatgtttttgagtatatccgttctgagacatacaaatagtaagtagactctgattttctgaaatagtagactgtgattttatagtatttataattacgcctttaaaaatattatgtgacagtatcctattgatggcagttagcacttagcattttaagatgttttattaaaaactgcatgtcggccaggtgtggtgtggctcacagctgtaatcctagcatttggggaagtcgagactagaggattgcttgagcccaggagtttgagaccagcctgggcaacatagcaagaccccgtctctacaaaagaaaaagaaaaagaaattatccaggcatggtagtgcatgcttgtcattgtagctattctggaggctgagttgggaggatcacttgagyccaggacattgaggctgcacagagtcrtggtcatgccctgcactcgagcctggatgagagagcacgaccctttctcaaaagaaaaaaacaagaaaaaacagcatgtggtcattgtctctatttgtaaattgttttttattgatattttcaaggggatttttactgattttctttagagaatttttgagktattaaattagttgaatattcatggcactaaggaaattcaccattcagatcagaacatattttttttcttctgtgaatgcaaagaattacaagtgttctgaacaaaattgttaagcagtttatttataaaatcagtagagagtactagcaatgcgtcattctattatagagaagcttgtactgtagtgagatgataatctcttagagaaaaggggaaggcaggagaggaagcggaatctgccagcttaaagtcacagcatccaaatacctcaagtcctcactccaggtgaaaggagtctatgcaaaactgtcccaaaaacctcacgattcctgcttctttcttcctccatgtgtcaaggttgaaaggaattctgccacttccacgtgcttctgttgttatatgtaccgtcattattttcctaccttatcccagcccccagctgcaaaacaaactgtcatttatcaaatacttgcctgaccccaaatgctgagatctagtataattttaagcatatacaaaaaagacaaaaacatccctactcaaatgtaatctgtttttgtgtctgacatcaacttttaaaatttattttttaattaattaattaattttttttaagagacagggtctcactgtattgctgggctggagtgcagtggcacaatcacggctcactgcagcctcaagcgcctgggctgaggcaatccttccatttcagccttccaagtagctgggactacaggagcacaccaccatgcccagctaatttttttaattttttgcagagacggggtctccctttgttgcccaggctggtctcaaactcctggtgtcaagcaatcctgctttcatcttccaaagtgctgggattacagtcatgagccaccatgcccagcctggcaccaacttttgagaatctaacatcccaactattggaagaaagctagaagattgctaaaggtcacatttagttaagagtttcttttcttttttttttttttggtatcagaaatatgtcccacactcaagaaaaccctgtgaatctgtgccaggccagtgggtcgggattgattggcagggcagagcctctgcccagaagtggctggctgcatttctgcagtcttgcagcctgagcgccatgctcctggtcaaacatttagcacttgctgtggccatgtttccaccagacagaaacagagaagacaagctgtaaagaataatggccagccggagcatggtggctcacgcctgcaaccccaacactttgggaaggcaaggcgggtggatcacttgaggtcaggagtttgagatcagcctggccaacatggtgaaactaaaaacacaaaaattagctgggcatggtggaggggcacctgtaatcctagctattcaggaggctgaggcacaagaatcgcttgagccagggaggcagaggttgcagtgagctgagatcgtgccactgcactccagcctgggcgacagagcaatattccatcccaaaaaaaagaaaaaagaacaatggccttaaaatgaaatacactaaaattgccaaaatgataccgtatcctcctatataaaagcaatgtaaagcgtggtttagattactttagacaatactatgacacttacagtataagtctaaagacttaccttaaggataaaatgagataggtataggatgtgtattaattgtttcataagccatatagatatgtacagttattacagattcaattttttttaaaaaaatacgartgtagctcacccttagaaattagttaattatgaaaatgtgtgaaaatatagtcacaaattagcagatgattgtttatcttcttctttgtaarttgttaatcattgctatcgtgagttttagatggggctctaattttttcttagtaaacaggaagctatttagagcttggtttgtatggtatcttgaaaaaagtcattctgtatatgayagtatacagaaaaatgcatgaacaaactcctagccatctggaattagaggaaattctctgtttattattctggttaacaatttttagttttccatagatcactttataatttatagaggatgagaatacattgcatatgaaagtgcttttaattttaaaagattaaattgtgagtttctggattttgtattacctcaaagtaattattaggcaattaatcaccattctrcactgttacagactattttaactgatttgaatgtggttaggattctggataaatgagaggtatctataacataattggtatatctgtttttatgtctgttattagcatcctattttgggsgrttggcgtagtctaagcaatgtgtctgctaactttttctgtttcatttcctcatggagccttggattaccttttatgcagttaagtcaacattaaaaagtttcagtaggctgggtgcggtggctcacgcctrtgatcccagcactttggggtgaattgtggggtgattcaccatgaggagggtgaatcacttgaggccaggagttcaagaccagcctttccaacatggtgaaaccccatttctactcaaaatacaaaaattagccgagtgtggtggtgggtgcctgtaatcccagctacttgggaggctgaggcaggagaatcgcttgaacctgagaggtggaggttgcagtgagttgagatagatggcgccactgcactccagcctgggtgacatagtgaaactgtgtttcaaacaaaaaaaaaaaaaaaaaaaaaaaaaagaagcagcagcttcagtaagcaccggagagccattgcctcctttccacggggaccagctggttccataacagctgcttttaggggcatctacatgatgctctgctgggaggtcacaaggtacatgagctatgctagggcaggggcctgctgtgagttctcttctgtcctccttgggaaggagaagaaggttggttactttgtgtatttcagtttttttgtccttctgtcattctcctgtagcagctgtcgtcacccctttgtcaaacatactagcccaaaatatggactgttagctgataagacaataagtcaaactcttaatcattaaaaaaaaaaaaaaaactgcacaaaaatgccgctattgtgtttcaccagattaacacaractgattttcaaaattaagggcctcctttatatgaatagatctgtattatattaagtatatcctcatacaattagaacccaactcaactctttgtgtgaagcagccatttcataattaggggatttttagtatcctatctgaaaaatattatgygaattagcaggtatttggctactttttaaaaacgttttacatgtggcagccttcaggggaggcagtttattcatgatactcatagtttttttaaaaaagcaaatttcacattcattgccttagtttttgatcttctagtctaaaacttattatagttcctaattttcacttctttgtctctgttgtttaagccgcatacttcccctttattaaaaagaatccttacttatatatttatcagtgtctgtgtgttgcggatgtgtatttgtctatctttaaactaccatgaaaacatacttttggttttggcacttaaaacgcctatgaacctcctcctccttcccccaccccaaccgcttttttctaaccagttaacccattacctaaatgagaggaataaagaactaaaaaacttaccggaatgttttcttttcattcatgtctatgatcggcgttcacagtgaccttcctcagagcacgtcctcaagttcttctgagtctagggcagagaggatggatgatctgatttataggctctaatggactccaagaggagacatggatacttgaaagaaaacaatgaattcagtgtgtcaacagaattaaaatacttggagatgacttagcttcatgaagatgggaacttgttccattaagcaggaggggtgtggctggtaggatggtgaggtatagttcttcagagattgctctttggagtaacattctgggcattaatcacggccccttcatcatgtctcaggtggaagctgctgtctcttcatctttcgtgccttccacaggggaacttgttggctgatgtcactgagttgccggttaacatgaaattatgagcttggttgggtcgttgaagcttacatcctacatgctccactgtgtttttaaactgtcgctgagttatacaattacctgttaactctttatttgatggtggttgtctcttcgacctcttttatttctttgaagcagaattatgatggaatactcatcacttaagtttccagaaggtagatttttttcccccaggagaggcagtcaagttgaagtcagcacccttgacaagattctttgtgaaagggggtaactcacactttgcacatttccatcaaggaacgtggataccaactgcaagccattttaaaagctgacaagttaactcttgtcaacaagttaacaaaagaggtttgacaaatgttaggctggaaatgcttcccttgaaagaggtatttggcaaacaggcgtcatcatgaaaactgcaatttgccaagcatggcagtcctaaagcctcatttccagcatggcatcactcacaggatgcttcctcgtcattctgcctgtctttttcacctttcttttctctctccggaaaagttccccactcatttgtgttttgtgtgttccgtttttttaaccttaaatgaaagaccagccatactattattcatattagttaacaaaaacattttaacaaagcagtctttggtgaatggtgggaaaccatgagataaaagctgagaattcctctttattagaaatctagccaaataaatcatcctgtttgatttataaggaaacattcttttggctgttggttattgtttttcacattgttttacttgtggaattaaagctaattaatgttttatttttcttctgcatgctgtgcaaacctgttacaagctgtaatggacgtacatgggctttattaaacaactactatatcctctagtgactgctgagtcagtggcctagaaattctttaaataacttcactgatacaaccagtccaccacaaggmtagggcatttcaaacctaataggtgagcccattcattttaaaacagcccttcactgtaggaaattatctctaagaaaaacttaataaacatctgatgaagtataaatgggtgcacagagctagcaggtgattttataaatatcttcacaaagatggaggagagggttaaatttccaggatctttctagtggttagtaaattgaacatagtgacaatcagtatgtagaacaatgtagactcttctttttcattgctgtatctgaaaatagctcaaattaagccacagaaaaacaatttctgtgtagtagacatgaaaatgaagaactgtttttctttaaagctttttttttttttccttagggacacagtatcactttgtcacccaggctgcagtgcaggggcaccatgatagctcactgcagccttgatctccagggctcaagcaatccccctgcctcagcttccctagtacctgggactacaggcacacaccacaacgcctggctagttttctattttatttttttgtggagactgggggtcttgctatgttgcccaagctactctcaaacccctggcctcaagagattttcctgcctcagcctttcaaagcgctgagattacaggcacgcaccacggcacctggcttttaacataaaggtagtttttacattttacaagttgactatgtattctcttcctggtgatatatattttcttcataaatggtacatatttgtattattttttctttttttgagacggagtctcgctctgtcgccgaagctggactgcagtggcgtgatctgggctcactgcaagctccgccttccgggttcacgccattctcctgcctcagcctcccgagtggctgggactgcaggcgctcgctaccacatctggctgattttttgtattttttttagtagagacagggtttcgccttgttggccaggatggtcttgatctcctgacctcgtgacccgtccgcctcggcctcccaaagtgctgggattacaggcctgagccaccactactggcctatattttcttttttaaagttgaaaatgcattatcacattttatccataatatgtgattcaaagttttggcatctgtggacctatttgcaagaaaatatgttgcatttaaccagtattgctaaaaagtatcagagaaaagggaaacccatataatatatttggggtrtattgtgtcacatctcttatttcatgttaacttcaatgataaaattaggtagcatcacattttaaaacacaaaaaactccagaatgtttattctactgaataaaagtaagccaatatgtaatactaacttttgaaggctgggtgcagtggctcatgcctgtaattccagtactttgggaaggcgaggcaggaggatcacttgagcccagggagttcaagaccagcctgggcaacatagtgagacttcgtcygtacagaaaatgaaaaaaaattagccgggcatggtggcacatgcckgtagtctcagctacttgggtggctgaggtgggaggatgccttgagcccagaaggtcaaggttgcaatgagccaagatcacaccactgaactccagcttcagtgatagagtgagaccctatctcaaaataataataataataataatttgattttttgtttaattgctcaactgttcctgtatgtgatcatgaggtatcagttaccctgctaaattgatacctccctctttaatatgacaggaggaatacagaggatgtaaggaagaatacgtaagttcttactctcttccaaatgttgtgatagattgcttagtgtattttgcatttaaaggatttttttttctgccttgtaacttggttaacactattattcatatatacttcacaggtaactagtatttttcccttttttgcattttcataatttattcaatatatgatgttttcacaggcttttgaggctttacttttctgtaattttatagctcatgcaaaatggttcagttttttaaatggaaggtgcttgttcccatttgatatttccaggacacttggattctgtgagttaagttgggaacttccatcccctaatcctatgaaggtcaaaggtgaaactctactagggcttaaaaaccagcttcaggagactagctgtattcctgaagacatctagtaagactccattgtatacgtgtcctactctggagtgtttttcactgtgatatgcaatagatgcaaataaagacttggaaaatgtaccctcccatatccacgttgctttcttcactacttccctctggtcctctaatgtggttaatcctccagcactctgtgcttgcctgggagctctgactgggacctggtaggctcaggtttgaccagtgagaaaaaaccctatgctccttgccttttttactcaatgcaatttgcattttattcaatgactagtgtacttatctttgaagagttgtggataactattagaggggcataggggaaaaaaactacagctgcaacatcaaagggagaagagagatttatcctgaaccttgcactacaaaagscttttccrtaggactttaaagagtaaaactatctcagtctctctctgtgtgtgtctctctcctcctattccagtcccctctttcccctgttcccttctccatccccctcacttgattgttgactatcaagcctgcatttggcatgccttatacagctcctaaagtggagcatgatacattacagtatcaatttaaggtaaatagaatatagataatttgtctcacttgacagaaggaaaataaatatcagctagactccatccatactccaaaaaacccataatgtgtcaggttacattctcttcaagaggagctattctgagctccttttttttggatgctrttcatttgatataatcatattgaactattggatattgacctcactgaagtgaaattggtcacctctacatattgattattaactcccaggagtcttaaaagttcaatgcttgatgctttctattcagctgagatgaattattgcctgcatttgctgtttttatttgagagataaatttaaaagtggcgcttttataatcaaacaaaactgtttgtggtttctaatctctacacagtaataacttgttttattacatgctggttttttattgaactctggtttcttatcctggccaggcattgttggaggttttgtggggttttttaaatttttaattttgggcatttaaggattcttctgtgttgtcagttattttagattaaaatgcaaaatgctatgaaaggagtttcaatcaactttatcagataaaaaacttaaatgtgagttatgttcacaggcatttatccatgcctcaatgtattcatcaagcattaaggaaataactttccatattttgttctactgtgtttgcatattatttgtttataagactcttgatattttttaaaatgtagtcaagaataaaatattattttccactttaatagttctctctgggacgcatgaaccagagcgactccatcttcaatggtaactgagtaaaatgargctgagacctgctgggctgcattcccagatggttaaagcattctaagtcacagggtgagataggaagtcagcacaaartacgggtcataaagaccttgctgataaaacaggttgcagtaaagaagctggccaaatccaacaaaaccaagatggcgatgagagtaacctctggtcgtcctcactgctaccctcccatcagcgccatgacagcttagaaatgccatggcaatgtcaggaagttaccctatatggtctagaaaggagaggaatgaataatccaccgcttgtttagcatatcatcaagaaataaccataaaaatgggcaaacagcagcccttggggctgttctgtctgtggagtagccattgttttattcctttactttcctaataaacttcctttaactttactctgtggactcgccctgaattctttcttgtgtgagatccaagaattctctcttagggtctggatcgcgacccctttcctgtaacagttcatttttaaataatcttatttggtgttgtttggttttgagacggagtcccgctctgttgcccaggctggagtgcggtggtgcgatctcggctcactgcaacctttgcctcccaggttcaagcgattctcttgcctcggtctcccgagtacctggggttacaggcacacactaccatgcccagctaatttttttgtgtttttagtagagatggggttttgccatgttggccagactggtcccaaacccgtgacctcaggtgatccgctcacctcagcctcccaaagtcctgggattacaagcatgagccaccatacccggcctaaataatctcatttggaacatatacaatactgtcattgtcaaaatgcacatactttatattctctatccaattaggtagtgtctatttggaaattaaattattgaagttttggggtttttttgtgrcaggttaatgaataagtacagtggcttttgggtgtttctttttcttttcctggtgacagctgattttgtctttactatttgtattcgtttgctttggctgccataaccaagtaccacaaacggcatggtttaaaagcagaaattcattgtctcatgttctagaggccggaagtcccagatcaaggtgtcagcaggattggttttttctgagggcagttagggaagggtttgtctaaggcctctctccttggctcttttacccctgtgctgcttcacatcatcatctctctaggtatctctgtctctgtgtccaaagctccccatttcacaaggatatcagttatccggggtgagggcccaccctaatgactgcattttaacttgattatctctttaaaaacgctgtctccaaatatgaccattgaggactaagctctggtttttttatcttgccaaaattcgtatctagagagttggggagtcatgccctacwaaccataaattcttatcagatgggttttatttaaccctacatatcctgacttactttccaatctgactctggcataacattatgtgacaaagaagaaaataaaaatcgtttaccccaaaacatgtttctttgctatattttgaaatggccctgcacagccatcctttgtgggtgaaaatgcgcatctgtaaagaatctctgctagcatagctagatctttttctttcaccaccctcccaatcctgaggagatgaactgagtgtctagcaccttgtataggtctgaatagggaacatttgtcatctgttgtctctraggacagccagtatgacacttcaagaatcttggtctccacaatcttttatcttaacctgagcatttcctttctattaatcccaggtcttagacaaactcaaccaattgtcaaccagaaaatgtttaaatttacctaaagcctagaagacccagcttcgaattgttcgaagttgaacaattgaattgaagttgaattgttgaaccgcctttggaccaaaccagtatatttctcaaatgtatttgattgatgtctcatgcctccctaaaatgcatgaaaccaagctgcgccccaaccaccttggacayatgttctcaggacctcctgggggctgtgtcacgaccgtggtcactcatatttagctcagaataaatctctccaaatattttacagagtttctcctctttttgttaggaggttaggacttcaacaaaaaagtatttggtaaatttgccatataaaataactaaaacttcaatgataatttactcagtctccatataaacaacatcaatcaaaagtatgtgcgtgtcaaaggtgatagaattgtctgtcttcccaatgagatgatttacaaattraccattatagtggaaaacagtatttcctgggctattttttaataccatgaaccttataaacacatatgaaataatatacaaacacaatagaatgaaatatttattgttactcaaatgcccagaaacggcattgagttgtttatgaatttgttccttcattttcctctcttcatctgtagcctctacaccttcacagggagacacgttctgtttatgagccagtgtgtttaaatggctctccaagtcttgatccacacccctaccacaacacacacacacacacacacacaccacacacccattcctctcttaaggcttgggtttcaacatcatgttattctccagaaatgcacatttaccactgtttcattgtaaggaatggcagaggggtctgttattgttaatcttttaagaatggaccctgttaaaacaaaagctgctttgaattcgaagatgcgttaggaatgaaaggtacctaacaaaccrcctctttgtcctatttggtagagaattcatgaagggagggttccacagagcaccaacccctattgtgtccttcactcataaggagggcatgtgcggtgtggagggtctgtgtcatgtgatgggacsccctccagtaggtgtggatcctgggacctgtgtggtcctgtgtaatggctcttggagttttgttacaggaaaggggtcccgatccagaccccaagagagggttcttggattttgcacaagaaagatccagggtgagtctgcagggcaaagtaaaagtaagtttattaagaaagtaaagtggtgaaagaacagctactccagagacagagtaggtgttcccgaaagtaagaggaggaacgcatgtccaccctaggtaacatgcatgyrkgtgtgtgtgtgtgtgtgtgtgtgtgtgtgtgtgtgtatgaatgattttaaaagaccatggagagatgtgttctgctacaagggtttctgataaaggattaattttcttaattactatattttgcaagaatcaatattatctttaaagcaaaattaggaatgcctttgttttccagatatcgggatatcaggacactcccaagtctgggtctgtttagtcaacattatcagtctgttcccgtaactataagcatttagaggctaggaatgcctagctgcctgggagtgcagcccagcaggtcccagcctcattttcctagccctcactcaagatggagtcactctggttcgaacgcctctgagggttttgccctatagagtgtggagtcagagattccctgtcccatcttgggactctggtcaccacatctacagccttcatgatttttgtctcatttttcctaccttgtcccaggagatctatggattggtgggtagcatcaagaggcacagaattctcttctcatgtagttaaagctggcttgctttctcagcatgccaagagaggtatcaaagatggagtgcttattttcataggatgcaccatgctgtaaagacacagtgactcttccgtgaaacactaaggaaaaaagaaggggaaataaggaatataggacttgttagaggaaaaaggctccaggtagagatggattgatttttattataaatttgaactttttaaaatcaaaataacatttttaaaaaacatacagcacatatatatggcatatacataggacttgttcttagattactcatcttagaggtggcttctagtgtcagttttctcatggcaaatgacctcatcccacccacctcagcttccccatctgcacagctcaagtttcaaactagatcatctctgagggtcgtcccagcaatgatttctaatcctcagttctttatttttctaggaaacatattttattgacatcaattcattatttttttaattcaatttaattcttaaatttgcctcccatctggatttgctttatcgatttttttaaggcaatagaagacaatgatgaccctgaatacaaattgttacgggaaaatggatccaagataaaattaccagatcaacctttttattccatattttatggaatatctaatggatgtttggcagtaacttattcttacacacgaattcctgacagtttcgattcttcagacttattaatcagtgtagtcagcaccagagcaattttatgagacttaacagtcatcaaaaatttattatcagataaatcagagaaacaacgagcatcttaataggttagagaaagtggcatgtaaaggatcatttaagatggtgctttttgtcagttgtgcgttatatttacaaccaatatctaagaacttactcwtaatttcatgcaaatagtcagcagggtgatagttgctgtcttaggtcaaccttttctctttgtttttctccagcagaatgttgtgtttggtgtaactataaggctaagactgctaaatagacacacaataggaagcatcatttcccaatgttaagcctatagcatttattttaatgcagtatctccattttcttctggattttattagagttgtcatccaaaattaagagttactgagctcagccctttcccttgggaacaaggtgctaaacttgagctctttgttttgttttgttgtttcattttttcctgacatagtttggatatctgtccgcacccaaatctcatgttgaaatgcaatccccagcattggaggtgaggcctggtgggaggtgtttggatcagaagggagatccctcatgaatggcttttgccgtcctcttggtgatgagtgagctcttgctctgagttcrcacaagatctggttgtttaaaagtgtgtgccacctccctccctccccttccctttcctcttgctcctgcttttgccacgtgacatgcctgcacccccttcatcttctgccatgtttgtaaacttcctgaggcctccctagaagcaagcagatgccagcactatgcttcttgtacagcctgaagaaccatgagcaaattaaacttcttttctgtataaattgcctagcctcaggtatttatagcaaygcaagaatgaactaacacagtccttgttttttatttttcttcttcttactatttttttaaacttgagctcttkggaatgtcatgggaaaatggtattcagattgcctttcttatgtccaggcttcacgtgtacattctgtcctgagacacaggcctgtgtctgctgtattctcggcactgtttttgataccccgttaaaggtgtaataagagaccagatttcttaaaaatccggtttttggctttgtgcgatgtctcacacctgtaatcccagcactttgggaggcgagggcaggcagatcacttgaggttaggagtttgaaaccagactggccaacatggtgaaaccccatctctactgaaaatacaaaaattagccaggcatggtggtgcacgtctgtaatcccaggtactccggaggctgaggctggagaatcgcttgaacctgggagggagagattgcggtgagccaagattgtgccactgcactccagcctgggcaacagagtgagactctgtctcataaaaaaaaaaaaaaaaaaaaaaamaaaacttgagtctttattgtgccagatgaggggagtttttccatcaccgtatctttgccctgagtgttcctgcatcacagtatcctctagggcagaaggatggtgatggtgggccacgtgggagctgagctggcaatagagagccttcagacagagctgctgggaatggacccagaaagacaaggccgggttacatcccagcagagatacaacctgctttccacctcacgtccacgtgtgctgccttgtctgtctggaatgctctttcttcacatctttacctattaaatgcccagttattcttcaagtgtcaggttaaatatcgcttcctcagagatcttttcttggaaggtttccctactgcccatcaactctaagctccttttatcatctttctttagggcctctactttcattagtagtaattttaataataacagtggctatcacttctttcccaggtgtcagacattgtatgccttgtatgtactgnatgtaagtttctcactcaatatttattggtgtgaatactacctgtattttagtagttaagtatgtgtttttttctcctgtaagagactgaagtctttttgaaagcaagattccttcttgactgggctttgcacatgacatccccagtgtcttatataacttctgacaggtcaccctaatttctgaaaagtaagaccattctggggtctggagtgttccaagttatacagttcattgtttttggtggtaggtaataaaaagtactggaaacattaaaatgtgttctcactatctaatactcagcttagattatgacttccctatggtgcttcgttatttttatagatctttttaccacattactcttatggtgcaaatgaaacatttccttaaccaataaactaattatgtttgaaagcaagacttttttttttttaattcaaatctgagggatctgtgattcacttgtctgccttctctttttccatgatggagtagtccatggggcatgtggaatgcgtgattgtgcttgtaagtggatggaatattcctgaaggataggcaataaactagtaatgtagtaatggtggttatctctagggaaagaaactggatggcaagagacagggaggagtgggcacatcctcttcactctttatcctgtggtacctattgaatgtcctattttcacatgtattcactattgaaaagattatttcttaaaaaaagaaaatactccccagtaggaagtttttacttccccatgaatgtataaaggaagaaaccacaaagaatgtggctttgtaactggttttgtctacactatctcctattttcattcatttgaagattgtgtggaagtcctcctttttagtctccctttgatcaggtacactaaaaattttcaaggtgatatcacctcgtaaaatgagtcccgaatcttggaaagagacaatttgaaagacagcttgagagaaggtttctcgcttaatgcatggaccatcccaattcttggctgaagcattgtgaaatcttccactgtttataacacctgtcagataacattaggctttcctatgttcttggaagaatctgtggcagtctgtttttccttgagaatcaaatgagaaaagatggtcattcatgaagaccaacaaaagagaagaataaagaaaaagcaagaaaatggatttctacgttgggtttgttttgttttgttaggggtattttcccacctaagactttaagtgagagaaaagcttttctatttttgaaagggcatgagggtttgaaataaggaagaatggatcttgaaagaattgattgtgtcttaaaggatggaaatgcgcttcggattcctacagtgagacaaggattttttttttgtttcttttctccttaatttttttaagctgtcaactaagatgacgtgtgtgtttcagactgtttatgtgggattatgagcatgtttaatctgttcttgtgcattcccaatagaaactgcgtgagtggtgtgatcttttaatagaatgtgtcttgcaactaacaaatgtattttggtgctaaattctggataattcctaagaaatgtaaatgttgtcaataaaagtttttgttttgaaatacttataatcttggagctatattattttaagttttctgaagacagtctctgcttcatttttctaagtttagttgagacagggcaacaagaaaaaatactggccataaagtaaaaatattctctataaatttttggaacatggttagaagagaactgcaaatggggaaacagctccttgcaggccactgtacacatgcatgatacaagacgacttgggtttactctggtttcagtactaagagtattgagtggcttttactagaaaaattcaggacctgcattataaagtcagctactcccaacttcctacccccatttttattttcttcatgtagattagtgtgtgatacagtttgcctcaattacactaaggagagagaattgacatttattgacttctgtgttcctaccatgcacatccaggccctggtgaattctttacagaattcatctcctgtaggttcacagtttgcctctgctttcagacgagaaaacggacagtcatcgtttaagtaaaacaactgaggacaaagccagaaatcaagttctggccagtttaaaagaacgttgtctcattttccatgttgctttgagtaacatctgggaagaaaataagaaaatgttaagtttatgttgataccctcaaagggaagccagtgtatgaagtttaggggaatgtacatgatcatttgacttttctggttcttgaatcaaattcagcttcctacaaggcctcatcctcatactagggttgcaggcacatgcgacattcaagggtccctaacagtattcctactgccagctccttagtccctcagggctagcttcctgcaattcaccctgattctaatttagcaaccccttatctgagtggttctggtacaacaagtacaaatctatctttctgctagatacaccctctgattttgggattagggatactcaacctgtataactgcagcccacagtggatatataacacacatttatacaggttgagtatcyctaatccaaaaatcccaaatctgaaaggcaccatatctgaacctttttgagtgctgacgtgacactcaaaggaaatgctcattggaacattttggattttcagactagagataatgcactggtaaatagagtacaaatatgtcaatccaaaaaatctgaaatccaaaatacttctggtcccaagaattctggataaaggattgatatggtttggctgtgtccccacccaaatctcatcttgaattgtagcttccataatccccacatgttgtgggagggacccagtgggagataattgaatcataggggtgggtttttctcatgttgttcttgtgatagtgaataagtctcatgagatctgatggttttataaagggcagttcccctgcacacagtctcttgcctgccrccatgtaagatgtgcctttgctcatccttcatctgctgccatgattgtgaagcctccccagccatgcagaactgtgagtccattaagcctctttttcttcataagaagtttaatttataaactactcagtcgtgggtatttcttcatagcagtatgaaaatgsactaatacagggatcaacctgtgttattttgtagtcgggcttcagtctgttaatgcatattaaagggtatgacctttctctagaatacttactagtatttgtctcttttggacttgaggatggactcctggcttttcttggctcatcatgtaccaactgactgtaatcagattggccaggacagtctttaccaagctttctgcgtgatcccttctttgtctttgttttattagctctagactcaggctctaattctgttgcccatccaagaatgagcccttctccagggagctcttatccactaagtggaaaatcatattagcatccaaatctgaggcccaggaaagttttagagcatggaagcagaggcagggtgatgtcaggtctgccagctatttgagtgacaaagcagaaaaattactttctactcaaaggagcacgcgttcatgttgatgttctccatttacttctatcttttttacatttattttgtccttactatattaccagaatttattaatccagtccccctttgccaagccatatgtactaaatgaaaccatgtgtttatgtgaatagtgatcccatatttccaaattttccttttcttgtctcttcctgacgctggtctctagtgttctggaattggctgccaagtgtgtaagctcaggaagttccccttgttactgtccacagagcaatacctgcctgaaaagaaaaagaaacagcgacctccttctaggttttatactttaaaaaagaaaaaaagaagtgtgggccactcagtagtagaaagccttaggtcacctgatgtctaggtagaataccatttaattatggaacaataacagtgacatcgggaagacataactacaaaaccttttgaagtctgttacctcctgattttcttgggcactaatgtttgtcttttaacactaacagctttacacttttttttctttctttttttttttttttttgagacagagtctcgctctgttacccaggctggagtgcaggggtgcaatctcaccgcaacctccgcctcctggattcaagcgattctcatgcctcagcctcccaaacagctggggttacagtatgtaccaccatgcctagctaatttttatttttatttatttatttttgatacagggtctcactctgtcgcccaggctggagtgtagtggcacagtcttggctcactgcaacctccgcctcccaggttcaaaagatgctcctgcctcagcctcccgagtagctgggattacaggcgtgtgccaccacgcctggctaatctttgtatwtttagtagagatggagtttcrctgtgttagccaggctggtctcgaactcctgastctcaagtgatctgcccacctcggcctcccacagtgctgggattacagcttctggccggctttacacttatattcagtttctaaatgaccttaggcttgctgtcttatctcattcaagtttcagttcaaatgccatctcagcaaagttttttccattatcactgtatctaaagtggaccccatcgcccaccacccactcctgcctccaattttatcgtctctcttatgcttagaatggagtctcctgcaagagcgggagacgtagttttgtacactgctctgtcctcaggagcttcagacattgcctggcacctagtggactctctgaatattcgatgagagctgttgttgtttcaagcatactttgtcacctgcagtgtaaacatttctgttagaggatttaaaaaaaaaaaaaaaaaaccttccgtgacacatccgtgacacattttcagtgtttcccttttccttgtgtctgagttgctcagatttcatattattactgccacttccatcaccataaatgttgctctgatgtttccaaggctgcagcctttcccaaccagctatttcccatcaaatctagtcgctctttttagctaggctttgaaagaaactcctgcacacagaattttaaagggcaatatcgggggccagggggaggggaacaaaacaaaaacagacgctttgtttgacctggactcagcccacttgccttatattttgttttgtttttgagtcagccaggcctcccatcccctaacagacacctctgtgtgtaggacctagatattggcygctgagagcctcaggatgcaggtgttgcttttgtgttccatcacgatggtgtgaaagagcctataaaaggtaaattggcaggctttgaactatagtaattgcttgaaaataaacagcagaggagaggggaggggaggcagctcttcttcccagcccttaaaatatgtgcgggttacgttggcaagtcagaaaaagtacttagagcctgatctctgaacctaaggacctaggcagaagcgagcataaagagtccctcagtcatcacgcagtctttgggtgccagaggtctcctgatcagccccattgagaagcatctgtgtgctgcaggaggctgtgccgttgctcatccttccacctgcgtcatttgagatggagcctgacctgttgaacacagggacatccagcgccagtcaggcatgatcacgtgcttcaagaaacatttggcttttctccacacagaagaatcctgtcaagacagggcttctccatttgagcttaaattttctcacagatggaattaatttyctatattgctaagaaaaattctcccagtcaaattcccattgttaattaagtgttgaggagaaaattggtattttgtttctttctcctaaaatgtggaaataacatggtttcattttaattatgtatggcaccagtaaaaagaaaaatttgtagctgctctgttcatgttggagcaaatgtcctgcttttgagaataagtgtggctgcatgctatacaaaagagaaacagggactccacagcaattgtcagaaccacdgtatcacagcgcttctggtctctgagtcctaccaggtaccggagatgmacgcttctsccagcgggacttatggaccctgaagaagcatttcwatggggtcaaaggacttctgaataccctctaaggaaatgtacaaaaactatgaagtgccttttaatgaggagcaggtgtagccttggagaataagcttgccctaggagacatgctaggttctcttccacctgtagaccagtgggtgtaagcctggccctggaaacaggctgcctgggttcaagccctacccttaccttttgctagctttgtgacattgggccagatagatttgtttttcttttaacatctttatttgacaacaattggcatacaacagactacaattagggtgtacagtttgatgcatttgataaatatatacatctgtaaaacaatcaacttaagacagtgaacaaattcctcatccccaagggtttttttatgcccatgtataaaccatatttctcatttgtgcctctcccttcatttcccccatccccaggcaaccactgacctactttctgactgtatgtttgcattttgtagagtgttcgataaatatagacatataatgtgtactctatttaaaaaaaaacaactggctcctttcattcagcataagtattttgagagtcattcattcttgttccatgcatcagtagttgatatcttttcattgctgatttgtagtccattgtgtggatatacctcagtttgtttatccttttgcctgctggtggacrttaggcttatttccagttaggggctattagaaataaagctgctgtgagcttttgtgtaaaagtcttttgttgaacatgtgctattgtttctcttgggtaaacacctaggagtggaatgcgtgggtcatatggcaggtatggatttacctttttttttgagacagagtcttgccctgtcgcccaggctggagtgcagtggcgtgatctcagctcactgcaagctctgcctcccgggttcacgccattctcctgcctcagcctcctgagtagctgggactacaggcacccgccaccacgcctggctaattttttttttttttttttgtatttttagtagagacggggtttcaccatgttagccaggatggtctcagtctcctgacctcatgatccgcctgcctcagcctcctaaagtgctgggattacaggcatgagccaccgcgtctggccagatttacctttttaagtaactgcaaaactgtaaaataagataatcctggattatctgatatacaatttctcacttaaaagcctttgagccagccgggcatggtggctcatgcctgtaatcccagcactttgggaggccgaggggggtcgatcacaaggttaggagattgagaccatcctggacaacatggtgaaaccccatctctactaaaaaaatacaaaaattagctgggcatggtggtatgtgcctgtagccccagctgcttgggaggctgaggcaggagaattgcttgaacctgggaggtggaggtagcagtgagccaaaatcgcgccactgccctccagcctcgcaacagagtgagactccatctcaaaaacaaacaaacaaaaaaaaacacctttgagtcaggtgtggtggtatgcgcatgtagtcccagttacttgggaagctgaggtgggaggatcgcttgagcccaggagattaaggatacagtgaactcagatcataccactgtactccagcctggacaacagaacaagaccctgcctcaaaacaaaaacaaaacaaccccctttggggcctttgaggaaatgactaattgcaggtccctatcaggagaatgtagaacaaagcctcaaacatcttaacaatccagaaagcaagggagctatcaaagattgtcaaaagatcacacctgtaatcccagctctttgggaggacaaggcaggaggatcacttgaacccaggagttccgagactagcctggacaacatagtgtgaccctgtttctaccacattttcttaatccagcccaccattgatgggcacctaggttgattccatgtctttgcaattgtgagtagtgctgtgatgaacataggagtaggtgtaaattgttctaccacaaggttctttcatttcagtcatttcaggagctttaacagggttctggctgggtgtggtggctcatgcctgtaatcccagtattttgggaagccgaggcaggtggatcacctgaggtcaggagttcaagaccagccttaccaacatggtgaaaccccttctcwactaaaaatacaaaaaattagccgggcgtggtggtgggcccctgtaatcccagctactggggaggctggagcaggagaatcacttgaacctgggaggtggaggttgtagtgagtcaagattgtgccgttggactccagcctgggtgacaagagcaagactcaggcttaaaaaaagaggttctgtggcgctatccatggtgctgaccagtactgaccaagggaacaccagaagaaaaagaggcaaagcagggagcatgaaagatgagtttggtcttatgtrcactaaatttgaggttttgggagacccttaagtggagagatatctaattgagaatgtyttatgggcttggaattcaggaagcaagtttaggctggaggtagaacttaccttcctgtggccaagtcctcccagaaaccctgctttgattagtcaccagcctggcaacccctcattatggtgcagcccagaatactgcagcaacagaatattctagcttcagggccttttgctttgaagaggtaggttctcagtttatcaattcatgtctgtgggtatgcattgctagctgctttgaggagttttgtttatcagattgagtggccatatcttggatcttaccatggaataaaaaggggtctttagcatgtacgattatgtagcaagctcagtgaacactgtcgaaatctatctcttttcattttaggcaccaagccaagtttgctagcccctgcgctttcttctgtaatttaaaatgttctacgtttttcctccttagttattctccagcataagcaatgggaagtaaacaattcacctggtcagcttagaaaacaacttactgaattgatttgcactacatgggcctgagtagaaactgctttatctagatcttagttttataatttgggagaaaagatggacctagacaccatttgtgagagactacagtttctatgaactcctcttaatcagtctataaggtaagaaagacatactatatgctattaaataccagtacttttgccttcttgctctgactttgggcatgtaagtatgaataaagaagagaagatgaatttacaatagcaaagacatggaatcaaccccaatgcccatcagtgatagactggataaagaaaatatggtacatatacaccatggaatactacgcaaccataatataggaatgagatcatgtcctttgcagggacacggatggagctggaagccattatcctcagcaaactaacacaggaacagaaaaccaaacaccacatgttctcatttgtaagtgggagccgaacaatgagaatacatagacacagggaggggaacaacacacacacataaaacaaacaaaaaaaagaagatgaagaaatggcagcttttgtagatgagtgtcactgttaggaagagggaggtttctctttgatgatgtggaaagaagacattggcttggctttccctggggtgggtaagtagccaaacacggtgaaagatcagcagctggtagaaattccaaaaggggaattaatgaaaaatggttaaaaagcagtatggtgctttggggggggraaaaaaacagaaaatgttaatttcaagaagacaatacaacagaaatcacatgggccttttagagtgaggcaggcctgggtttgaatgacagttctacattctgggtggtcacatgatcgtgagcgcattattttaatgccctgaattttttttcttctgtaacatattaggagttgcacgtttgtaggtcacactgtgcacagctctggtctagcatttgttttgggaaaaataagatctgatagcagaattctaacatttgtataaatgttcctcttaacagaaacttacaaagactctttgtaatagactgcaggtcaaagtagtgaggcttgaaccgctacagaaagcacaacagtattaaaggaaaagtgcaccacctcttggtgaatgaacatgtctatggccataactatatataagattatctgagaagtttggtaaccttaaacatataaccagccatatttgtacacaacaggctttctgaggagacatagttgcctggaatcatgtcagtggctgatactcttgaaacggcaaattgacatcacagtgggaaaagtgtaaaccaccatcaaagacagaaaatgaggtcactgcagtgtgcctccttttatttacagatctaggaaagttaataatgagggagatcagaggaaggggagtagaaaggagacaaaataggaatgctcttgaaatttatatctgaggacctttgtgactgcactgagaaccagggaaagcagtaaaacttggggggaaaaaaaaccatgttcaattaaatcctatttcaaatgttttatgatgttcaaattttatagaattataaagttcaggaaaccatagaaatgatctcattttccttgttactttttagatgatgaaattgagttccaaaatgattaaatgaccaacccaagacgatctagctaggtaatatattttgctcacaggatcttctcaaccactggtccctctgcctgaaacgtgtcttctatacaatactcatcgtccttcattgcacagttaatttccactgttctgcagattttaggtcttttatcactttcctttgggagtctaccctgatcactgcccccacatctcatcaaggtcaaataatgataataacagaaaacaacctcatctaatgttcattgaatacttattaatcatgataactctatgaggtgaatactgcttatccccattttctcaaaggagaagctgaaatacagggggattaagtaacttgctcaaggttacagttttaatatgtagtagagccagaattgaaacccaagcatttctcactgcaaactccaagctcagtcctagtctaccagttattctattatcagaataccttgctcctcctttagcatttattgttctcatatatttatatttatttgtgtggttatttgattaatacgtttttttctactagaatgtaacttttaggctcagattacgtatctttttgattcaccaaattttgcttagagcctaagtacctgatatctggcaggctcattgaatatagttcatatgtaaagtagaggtgataatagcatattttggccaggcacagtgcctcatgcctgtaattgcagcaccttgggaagccaaggtgggcagatcacctgaggtcaggagttcgagaccagcctggccaacatggcaaaacgctgtctctactaaaaatgtaaaacttagcccggtgtggtggtgcacgcctgtaatcccagctacttgggaggctgaggcacgagaatcacttgaacccaggaagcaaaggttgcagtgagccaagatagcaccagtgcactccagcctgggtgacagagggagactctgtctcaaaaaaaaaaaaattaataaataatagagttaatggcatattttatggtactatttaattgtaccctagtactaattgcattgtttggagaattgagataatatatacagagtagtcactagttcatgtcactcgctagtactcagtaactgaaaggaggttaattgtaataaatagatttagcttaagataacaagacagaatctgaatccaaatgctcagtgctcttaacttttattccctacccctttgggtacctataatgaacattattagaaaagtgaatcttagaaaatatattgcttcccagagatgatttcagattaactaacagacagctaaagtataagttccctccttggtgtcagttttattcttgagctggagatagacccagagtctttatgactcagtggtaattaacagataacttgtttttttctttgttttttgttgttgttgttgttgttgttgtttgttttgctttgttttggtttggttttttttgatgcggagtctcactctgtcgcccaggctggagtgcagcagtagcgtaatctcaactcactgcaaccttcgccccgcaatgctggggttcaagcagttctcctgctttagcctcctgagtagctgggattacaggcatgcgtcaccatgcctggataatttttgtatttttatataaagatgaggtttcaccatgctggccaggctggtcttgaactcctgacctcaagtaatccacccaccttagcctcccaaagtgctgagattacaggtgtgtgccaccgcacccggctgatggctcattttttaacaccctgagtttaaggtggctgtgagcccacctagagatttcccaggggcagttaggtctatccttgcaaaacacaaacttgttataatagttttggactatttttaaatactttagtgcaaacactatgtgatccacctgcctcggcctcccaaagtgctgggattacaggtgtgagccaccacgcctggcccagataactctctgaaccagcatctcaagctttggccattaggaaagtctaaagtaagtatcttcagatcaacatgttatttgagagtgcagttgtgatgtccttgttcagttactgcaggagaagggtacttgcttctttaccctttctttgaccttttagatgtatttgtttctacacgcattctgtggctttctgtgtatatttcaaagatgtagatatgatctattatttcaaatcatatccttgaagttcagcagtgctatctctaggtataaaagtacttgtagtaagggatcatcaatgtattctagtatacagacctagaatagctgtagaataaaaattgagttatattaataacctgtaaaatagtcacagataaaatggtgaagagatcaaaattaatcttaaaaaagcataagccaaaaatgcagatatcatagggtcaaaaatagtgatattcatgaaagttatgattaattatttaatcccaaggacacagtatactttaaaaatatatttcaggttcacaattgactagctattttatgtggcagaataccagctttgcatatttattaaaattattcataactgcatagcagcctagttgaactgttgagtccttgttcctttgtccaatatgttaccttgtccatttatcatagcactgtaatagaaatttgtctaaattttaggatgatccgtggaatatcttcagtgtcagcatgtcttaaatattttattctttccgttttgcctaatatgatctttttacataggtttagaagatatctccatggggaaaaaaatgcagtttttttaaggaataaattttagacagaagtctttgttcaaaacgaaaagttattatatatcattaatatttatgtgtcaaaatatttctcttacataaaaatctggacaagatgtgaatgctttttgtggaagaatggaagtttgtgttcttcatgcagattttgagataactatgtttgctttgagtattatttgttgagaatttaatgcattgctgtggtcattcaatttaacagtgtatttgggtggtgggttctggagtcagacttcctttagttcaaatcctgagcccaccacttagtgtttatgttgtttaactttctgagcaccagttatctcatctgtaaaattagatgataatagtgttcttcttggagggttgttaggaaagagtgtatgagataatgcatataagagcacttagaacgtgaccaggtgtggtggctcatgcctgtaatcccagcactttgggaggctgaggcaggtgggatcacctgaggtgaggagtttgagactagcctggccaacatgacgaaaccccatctctactgaaaatacaaaaattagcccagcgtgacagcatgcgcctgtaatcccagctactcaggagactgaagcaggagaattgcttaaacctgggaggctgaggttgcagtgaactgagatcgtgccactgcattccagcctgggcgacagagtgagaatctgtctcagaaaaaaagaagaaagaaagaaaaaagaactgagtcagacacataataagcattcaataaatactaggtgctgtcagtgttaataatagtatatcatggaatgcctcagcaagcataggctagagttttatcaagaatatatggtaaagagaagtttatttccggtattatgtctctaaactgctaaagacttcattagaagatgatgttaggaaagaaaagttgtacaactctttagctagaatattaattaaattatagtagagttcaaagaagtctcagataatctagtttaatgacctctctttgcgtaggtaaaaagtgtagttcccataggtcaagtgaccactgcaggatcacccatctgggactgcagactctaacccaggtctcctggttcaaagcctagtactcggcctgttttgaaacactcatttattagcaagaagcattcatcaatgttgtcttagatgcagcaattattttgggaaataagcagtacatgaaattttaggcagtatgtaacacttccttgcttctctgggtttggtgtcctagtgacttttaagcctccagaaatatctttccacatacctaagagtcacacagaaagtgattgactgtcgcagagctagagccatcatcagtgygtgtgagcagctctccctgaattcctcattgggacgatagtggtcgttttggtatgggtacagaaaatggaatatccgtggagtgatctgtaatttccctcaagacctcataaacttctaaaattaacataaagcctttcttccttataaaatagagtcatgtgttaaaggagatgcattagatgcttctgtgcagtatattttagtaggttctataaaatttgcaataaaggaaaggtcagtgttggtaccataaacagtgttcgtggagtcatatttaaccctagtcccttctgtgactcctggagtgtagagtaattgaactactcttctttgaaaatgcccctgtacccgtcactgcccaagaaagaccccactactacccagcactcttttcttagaggcactacctgctcctggctctgggacccacctgtcaccaaagggcagtctgaaaagagggtggatttcatctcatttacagcatgggagtggaagcttcccttctggctcagccacagttttgtagttgaggtgaaagtgaaaagactgtcgtcacactgatctgtggggtatgcagagcagagtcctccttctgtattttggtgatcacatgtgaaactaagagagtgcaagggtgacctctgcatactgacgacacatgtagttgtactgcgcggcgagtggctattcatgtgacctttctggctgtaggcgtagcttcccagcctgcagaggctcctgcactgtataatggcagagataatggccctgggcttgttccacagagcagttttcaagcttaattgaagaatatttttaacccattatcaagagcattaggaggaaattttcgaagagtcttgcttgatacagctctttcaattgaagaaagtagactcccaagtaagcaaattacaaccttaaatagtaatccatctttatttgcaatcccttcatctttccaggataaagactcctctcttcactctgaaagcatgaaaaggggcagatccagacagagcatcacacatgcttcttcctcctggtgtacaggagcacgtagggccctttgtttagaacaggatgcctttgaatggactgccttgaaaaaatttttcagaacgatcctaaccatgtctgccaggctctcatggcgcatacagatctggttggaagatatttaaaggtgttcaggcaacgtgaagggaaagcacccatctgagacaccatgaatgggcttttctttacgtcattatttctagctcctttctgtttctacgctgagcaaatttgctctcatcctttcaaacttagagggtttttttttttttttaaagattgctgagagatgcccccgaaattatgattaccacagccagtttctcactcagtcatggactatagtcaaatttaatcttatctttaacttcacagaatagttaatgttatcacacgcttgatttcttggattattttgtcttttacttttaaaatggcaggagaaaaataacccgatttttttctgtaattaaaataagtctgtatgaattagcatatgagtgatcagataatatctaaccagttgaagtttggaagttcctttcgtttaaacaaaaatagaatttcagcaccattttcatttattgattcttcttttcctgtatttcacagtttttaaaaatgtgtttgaagtcaccaaaaatatacttctaatgctgtgactaaatttgccacaattaagacacccaagagtccatcagggttaaagtaggctacaatatgtttataaggacaggcaaaaggtgtcagtgtaattttattaggaaagtgaaaaagagaagtctatgggcagtcaggaacaagctgagttatttaccaaaaatatatggtaacttctcttttaggtgtgtagtgtgtatctcaaagaaacacatgttagttcacaaggatttatgattttttgattaatcagaaatccattcaaaaaatttaycagtatttctcaaagagaagtgctgtctgtagacaccatgggcacatgaagtaaaataatctgtgaaaattctttgtcttgtaaaaataggagtgccaatctgatcaatgtattgtgttataccagctgtgtgggtgttacagaatgaattttggtctcaattttgtaacttacagaaaagctataattgcagtctctcctgcccacttgtatggtcaactaattttaaccatctctaaaaggcacttgcaaaaagggaaaaatgcccaattcttgggtgcatgggcaaaatatacatatagaaatgatagttcatgaggaccagatattctgaaaaccttctcaccatggtagactagatgcagaatgagtcagagaaatgtattttataactatattgctgaacttgtaagagtagaggaaaatcctcaaggggcagaaagaccttataataatttgaaaccaaagaaatgtgctaaaggagaccaggactgtctcaatagcaatgcccatgtaaggaactcagaacttaaccactatggaaaaagatgactaggcctggggtttggttgcagttggaggacgaaactctttcacaaagctagcacattcaaaggggctaccccctcagagaaagtcagagctgaaaaaattagcctaccaagaaaggaagcagatgggaaaatgtgtctgcttttgccattgctctacatcaaggaaaaatagtagtcatcatagtcatcttctctcctctcctaaccatttgtgactataagcttaatgttggatgggcatgcagtataagtatacgctacttgccaggtcatggaaactacatttaaaaaatgtagataatttgtttccaaattggtggaactctgtggcatttggtagagataagcataaatctggagcaaagcattaacaaaatcgtgtcctaaggattcctacagattcaactgatatgaagtcatcataaatacttmcacacacacacacacacacacacacacacacacacacacacgcactctctacatatcacacatacactctcagggaagcaatgaaaaattaccaaacagggaataacataagccaaaatttgcaagactcagcagaaacaagaaacacagatctacatcccccatgccttataacattggggtgcagaatactgcatatagaaaaatacatgtgagctatatagagaaaaacgttgagcaaagagtcagcaaccatcaaaaacaaccagaaagatctgaaaaataatagaataacaagaaatgaaaaatataatcattgcaattaaaatttcagtagataggttaaaagggtattacacataaatgaagagagagtaagtgggccaggaacagtggctcacacctgtaatcccagcactttgggaggtttgcagtgggtggatcacttgaggccaggagttcgaggacagcctagccaacatggtgaaaccccatctctactaaaaatacaaaaattagctgggcgtagtggtacgtgcctgtaattccagctactaggaggctgaggtgggaggatcactttgagcccaggaagtggaagttgcagtgagcctagatggtgccattgcacttcagcctgagtgacagaacgagagccttcctcaaaaaaaaaaaaaaaaaaagagagttcaagaataaatgaactggaaactcatgaaaaagataacacaaaacacagagtaacgagatgaaaaacagtaaagagagagtaagacatagggatgacaaattgaaaagatttaacatatgttgattgaagatccactatattaaaatactgaaaatgagagaagttaagaattgggaaaggtttgagattttaccttccttccaagctcataaattagcttcccacagtttcatggatgctgtttgaagacacaacattcctgggtcaaacacaaaggactttatttctcaccgcacaacaggtagcgtgaactttatgttcaagccaattccccctgctccccaagtcccatggggatgatgtggccctgatgcacactgggcgtgcagtgagtttgggtcatgcccaaagacacctgagcttcggaagcccaagccttttaaaatggtctgtaagcaaatgtgctctttaccttggagggagacattatctttagtattatttatcgtagtagacagtattaccttactagacagtaaacaaatctgctgtctgctccagagagacactatctctatcttccaaatatccttgaatagttttttctgaactgatgctgtcagggcctctgctcacaaaatatgcaaaagtttgtgagtcccatggagaattatttcccactagtggagaaacaatttaagactgagacgtttcagaacgctagaacattggaatcctctgatacagtttacactttgtataccaagcagcactaatacatatatagttagacctatcatggtggacaccaaaaacaaaagaggagacattaaaaacaaccagtaagaaaagagttcaaattgacaagctaattctgcagttatttggaagagtgaagggtcagaaataacaaaaaccctcctgaggaagaaccaaagtagtagagatgggctgtcttgccttagagacattaaggtctgttataaagctataataacgaagacagcctggtattagggtrccagtgtagttacagacaaagagaccaatggaacaggataaaaagcccataaataatctcatgcatatatgcacacttgacttacaatggaaggagtattgcagatcagtggggagagactgaactaatcaataaatcatgcagttacaagatcatacatgtggagaaacaaaatgaaaccagatcctgaagtacacaaaaaatcggttccaggtatattgaatatttgtatttttaaatcaccaacagaaaggttttaaaggaaaggaaaacagtagaactttcaaagaactaaaaaaaaaaaaaaaaaaaaaagaatataacctcagagtagagaagggtttcttaccccaaactcaaggaaacacagattgtaaaggaaagattaataaattcaactacattaaaatgaactttctctttatcaaaggataccattaataagttgaaaagatgcaagccacaactgagaaaagtggtctgcaacacacacattgctgacagccgattagtatctaaaacatttaagaaagataaattgataaaaggtatgaacaagcatttcaaagaaaggaaaacatgacttgctaatatacatgaaaaatggtcaacttcagttgtaattagagagctagaaattaaaaccatgtgacagcattttatatgtaccaggttggcaaaattaacatttggaacaatacagtttgtgggcaaggatacggagccacagaaactctgatggtctcaatctaattccctgcaaagaccaaggcagacatgtatagtctaagttctctagggttttatcaaacataagaagaagctgatttaacaaaaatcttatctgttcttcttaacgagcaccaaaatatttttattatttatttattttagagatggggtctcactctgtcacccaggttagaggtcagtggcgcgatctcagcttactgcaacctccacctcccgggttcaagcagttctcttgcctcagcctcctgagtagctgggattacaggtgcctgccaccacgctcggttaatttttgtatttttagtagagacggggtttcaccatgttatccaggctggtctcgaactcctgatctccggtgatctgcctgcatcagcctcccaaagtgctgggattacaggcatgagcccctgtgcccgtccacaccaaaatattttcaagccaaattgttctctggtcaaaccttgaatattgagatagatgtgctttatattttcaaggggaaataaatacctgcagagaaaaatccactgcatcccagatggataccagttttgtttatcttcatcccaatttccaaggttagataattcaaaagagaaccttaaggaatagccctcttagatatattctgcttttatttctattgcaaatggaaattgacaaattgacatacaaaatgaaaaattaaarcacaaaatatgtagtgattggaataaaggaaaaggcacaaactgctaaaatkmtccatgtttgagagagaaatcaagcaactgagccctgttatcccctagaagaatcccccggggcatcaagttgcatcttgtcatgaaccaatgagacaggattacagaattttttattatttttttttgagacagattctcgctctgttccccaggctggagtgcagtcgtgtgatcttggctcactgcaacctccgcctcccagtttcaagcaattcttgtgcctcagcctcccgagtagctgggatcacaagtgtgcaccacatctggctaatttttgtatttttagtagagatcgggtttcaccatgttggccaggcttgtctcgaattcctggcctcaagtgatctgcccgcctcagcctcccaaagtgctgggattacgggcgtgagccaccgtgcctggccctttggattacagaatttgacgataatgggttcaaagctgtctggaggcataacctccggggcagctgaacaagattataggaaaggaataataaaatattctgaagtctgtctatgcaaacaaacacagatgtctactctggaagaataaaatgtaccctagaattgcttttttttttttctagtatgattgagatgttatggtaatattaaaaatgaaaaaaaaaaatcccaaaagtctaacctagaataactgcactgatcatattgccttgttctttaaattcttagtatccaaataactttcagtatttagtgagacatattcgtacatactcttactaccagacagcctatttattaaacattcttaattcttgaactaaactgaatggtcaagtaagttacctaattagccagggaagctaaaggaagtactaggagttaccatcttagggaaaaatttccacacttggatttgaatacttgtgaaactcggtagcagtgaactagatctgaatcaatatctctgcctgcaagtcatataacctctatgagaggttaatgtggctcctgtttgactctgtgttctccatcagctaagcatgtgcatgtgtcattcatattttgttttcagcttgttacactgacaggaaaatctctgcggaataaagaaccagttttctcagcctctaaagctatactgtatttgcatatttccaagatttaaagagaacagtgttttccttgtgtggacggttcttctatttgtactgtactggaaaacactgacagctaccaaactgtctctcattttgttcctgctcattactaattttgttgattcaatagtggaagtggggaattttttaattagatggcatatttcaaaaccattttcttaaaaaccctgaataaaatgtccgacttttgttaaagccactttgctttgtgcattacatgttgtgtttatgaaaggattaatatatataagccgattctgttaggtagataagaccttctagtttagctctgttaattccatacatgattgtgcatatgcttgtgcatacttggttggtcaaggatggaaaggaatagcgaagctaactgagaatcacttgtttaaatacattgattttatacaatctcactttgcaggccctggttgacaccttaaaataaaatagaattctttagctggtgttctctttattttgtacgtaaggtaatccccttaacaaacaagcaaacaaaaacttaatctcatttgtaatactaacaattggaaacaacagaatgccctgtgagatttgattgattaagtaaataacaatgcaacaatatgattgaatcctaggcagccatttcaagttgcgatgtataagatggtttaatgactttgagaattttcataacatactataaatttgaaaagccgagagtctatatcccaaggcaaatctgtatggaaacaaaaaaaaagctttgaaggatacatgtcaaatattaatagttttcttaagtggtaggattgtatgtgggttttttctctctttatgctttccagtactttgtaatttttctctaattattatgtgcaacctaatttatttttttctaacaacatgtaaatttcaataatttattattttggctaaaaacatagaaatgttttaataaactttcataatgagaaatatattaagaaaaaaatcacatttcttgtatttttattatcacagtagtattcaatataattacaggcaggcctcaaagatatctcagctccagaacacagcagtaaggcaaatagtgcaataaagcaagtcacagtgcatgtaacagttacatttatactgtactaagatatattgggcgtgcaatagcattgtatctaaaagaaatagtggacatacctcaatttaaaatatgtgctgctaaagatgctgacgtggaaatacaaagtaaacacctactgttggaaaaatggcacccaaaagcttgcttgacgtagggttgccacaaactttcagtatctccaaagcataagaaaacaaggtatgcctgtattataggcatatgctttaaatgcatatataattaacaattttatgaatatgaattatataataagcaattatattactgcatacatatgcaaattgtatataatatataattatcaaacagttattgtatatcacatactctgctaagctctttatacaagttttcaggcaggcagaaaacataatcatcgccactttgtaggtcagcaaactgaggatttgatcaagtgctttgccctcagtagtgttaacctctaagtgacagatcccagctttgacctggagcctaagtcccaagcccgtgctcttaagcattgcccttttgtcttttactttatttaattgttgtcaaatattagcagtggttttgcctttatccctttcttgtcttccatttctcattgcagaagaagatgcaaaattcatttgagagagaattataaagattgtcacaattgaattgaagcaagtgatatttttaaatatctattgactaattattagattgcatttcacttattttattgaatgatacagaatgcatttctctctctctctctctcttttttttttttttttttttaagggacaaagtctttgttgcccagcactccaggcacattcgtggctcactgcagcctcgatttcctgggctcaagtgatcctcccacctcagcctcctgagtagctagggctacaggcacgtgccaccacacccacctgtttttcaaaaaaaaatttttgtagaaatgaggtctcactatgttgcccaggctggtctcaaactcctagcctcaagtgatcctcccaccttggcttccaggagcgctcggattataggcatgagccactatgctgggcccatttctctatttagaaaggaaaaggtgcacttgggctgtgttaaaggttgtgattcttaaattcacactaaatcatttcctttttttttttttttgtttttgtttttgagatggagtctcactctgtcactcaggctggaatacagtggtgcagtctgcctcactgcaacctccacctcccgggttcaagcgattcttgtgcctcagcctcccaagtagttgggattacaggcacacgccaccatgcccagccaatttttgtatttttagtaaagacagggtttcaccatgttgctcgggctggtctcaaactcctgacctcaagtgatccacccacctcagcctcccaaagtgctgggattacaagcatgagccaccacacctggccaatttcctttttttttttttttttttgcaaatttaggtgtaggcaacaaaccaaatatggcacacatttgtgtttcagggtcacaccatatgagcggtggcacacacttgtaatcccaatgctttgggaggccgaggtgagctgatcacctgaggtcagtagttcgagaccagcccagccaacatggtgaaaccccatttctacaaaaaatacaaaaattagctgggcgtgatggtgtgcgcgtgtaatcccagctactcaggatgctaaagcaagagaatcgcttgagcccgggaggcagaggttgcagtgagccaggatcacaccattgcactccagcctgggtgacaagagcaaaactccatctcaaaaaaaaatgaaaaagaagtcacagttaccctcttactgtaggcacttagggttacttgggggtgtatggagaaacaggcattattaatgtagagcctttacttgtgtgtttataaatctagggattagctctggtgtcacattgggcatcagtgaaattctgtgaaattcctttgataattcaatctcccctctccccaattttcgtaccatttctagaaagcatatgccacttattaatgcacaggtagtatgctcttgtccgatattatcttctttctgctcttatgaaatctagtacagctggcttcaatcaaatcataatacaaattgcatactgaaataaaaaataatactcagtgtttgtagccagagaccccttttggccctaagtatttagcttatatgtatttttaggcacaagtattacttgttgcagaattttcaaccaaggagtgaatgaatatttaagaaaaaaaaatctcgattgtttcagttcatgctctcagtcaaagcacatcccggcacatttatactcatccatcctgtgtgggcgaggagggaaagccgtgttactaccatgtgaaacttgcagtggtttttatttttaccctctgcacacacacaacagagtattgttttgtgagaagaattatgtgtaggagttttagagatctatttgtatcctagctctttcctaattgtatatccttagggatgtcactgaactgttctgtatatttcatcaactttaaaatggagatagtgttaatagcctgttgtaacacagaaacttgtttattaaaagtaggtaacatatgtcggagttacacagacttgaagcctgcttcttccctttctttgcttgcctcatgagcactgttagagcctttggaaagatacttcttttccaatggtgatgcaaagtttagtggtttgtctcttggctttacttgtatttttttccctagatttttttagctctcccttgtatatttttctgttctctatgtaaagaaagattcattaaaaattaattaggccaggcattgtggctcacgcatgtaatctcggcactttgggaggctgaggcaagcagatcacttgagcctaagagtttcaaaccagcctgggcaacagagcgagaccccatctctttaaaaaaaaaaatgtagccaggcatggtggtgcacctgtagtccctgctacttgggaggctgagatgggaggatcatttcagccctggaggttgaggctgcagtgagccgtgatcacaccactgcactccagcctgggtggcagagtcagatcctgtctcaaaaacaaataaataaaataagatttttagttttgtatctaatacattcaaataaacttatacatttgccatgtttatgagttcttttttaattgaagtgtaatttacatacatttgtacagaccgtgtgtgtgtgtgtgtttgtgtgtatataatatagttccctgagttttgacaaacgtgtataaccagtataccastttaggtatggaacattccgatcatcctggaaagtttgggaaatgtttttttccacttaagaatggctcatttctccagattctcgggttttttttttttttttttttgctttggggcaggtgaatcatctcttgttatcagcgcccctcctgtagcttctgagctacagtctttctcaatcagcctccttttactgatgacatgcttcttgaagaggaaaaagtttgctttctttttctatgagaattttccagtttttcgttttgttttgtttattatcttcctagcatctctcttcctcatttccaggtgatgctggcaatctattttacagtttagcacaacctttagactctaaagaggtcatttaaaggtgctttccaataagaagcattttagtgttgtctctgaaatgtttttactctccccctgcaccactcagaatttacatagtttttgcgtacataaatgtgctctctcctcccccaaatttagtaaaatgtaaaagtctgagttactgtcaattttgagatatttaggaaatttaactcaataccaaaccagccatttctttgaagtagaaataaatatttcatttacttactttattttgttttcctcttggcaaacacatagtgttacattagtttaaactatgtctgttattttaagtcagttatttgttattttttaaaggcttcattaggtataaaagctatctgtaagtcaagcttttaaagtactattgagatttgtcagccataattcaatttttattctttgaatcaagacctaaactagtacctttagagtaatattgcaaatgagcactacttattagaactgtttttgaaagtatgcaaagtgtgtttgttctaccttgccttgtatatttacacctcttcgattttgctttatgaggagcaaaagaaactgtcactatttgctgtaaattgaagcttttaataactaagtcttttctacaacatttgtcagctttgaatattctgtcagtggaaaataaaaatagcagggaaacccagcagtggtgacactgagaatttatctgcttatgctacactaaggtaaaaaaataaaatcttcaagggtgagcatttgacatttttctttcaaacaaagtacatttgaactgacacttccttgaataaattttagatgaaaagttggcaaaataaatgaataagtttcatcattaaacacagaacaccttttaacctagaaacaagagaataaagaggttgcttcatatcattgattcaatcctgtatgccttgtttgacatgagcttgaaaaataagctttataaatacataaaaaggaacatcatagctcagtagtaaaaacgttgatgcatatggcatttaaagttttaaactatttcatagtaaaaattcatgtgcagatcatcttgaatatgtgacaataaaaattaatttatctaataaagatgattcaagtaaatcaaatctaaattccatactccacatttttgttcgtaaattgtgtgcatccgttataaatattaaaaacatgaatgaaatatacattatgaaaaactcctgctttctctttttggataaaaacattgaaagtttttcagccaggtgcagtggctcacgcctgtaatcccagcactttgggaggccaaggcaggcagatcacgaggtcaggagatcaagaccatcctggttaacacggtgaaacctcatctctgctaaaaataaaaaaaaaagtagccgggtgtggtggcgggcgcctgtagtcccagctactcaggaggctgaggcaggagaatggygtgaacccaggaggcggagcttgcagtgagccgagattgtgccactgtattccagcctgggagacagagggagattctgtctcacaaaaaaaaaaaaaaaaaaagcttttcaggactccttattagtgctgacttccagttttagttagatctgcttcttgttcttctgcctctttcttttctttgcctgtctacttgtaagtctcttctcaaaagatgcctttatcattgtctttatgaataacagtgaacatttatggaggacctactgtgtggcaggtttgataaatgtaacaataggtcagcgctattttgaggaggaagaaaaatgttgttggaagtgtgcttaactatgctactgtataatcttcacttaaacttctgttataatagaaaggtgrttaatgagaccccatgaacctgcctcctcctgtcaaccttttgacgtgtctgcaaatatacagaattttaaaaataacctctcagtgagctagagatagtctcagcttttacagaatggacatgcctgcatcttttaatttagctttctgttagcgtgattccattcttacagattgagcctgagggaaagagagaattattgtcaaaataaatgagataattacatgtgtgtaattttacaaagcgctctacaactgtgtttstcagtgatgagaaatgcctagttctaaaagttccttgggaaggagtggaatttgaagagttttaratggcaagatgtgtttacttttggttttaaacaaaagtcctagtgtagtgttagggcctggtttttcacagtgataaattgggactttattgctgtatgaatggtggggttttttcccccaaaaattaaatctccttatgtctcttatgaaatctcatttcaaacaagattacaggagtcatttctggtaaaatttggacattaacacacattagtgatttgtgaagatggttgaattttttgtacrgagaatttttatactaaattcagtaaatagttctgttgtgccgtgtgccccctagaaaaatcacgtgcctataaagaacttaatagggaaaattgaagataatgattttcctctttggcagttttgtcgctgatttgcaaggtagtaacagggcatttgagttcattttctgttttgtgtgtgccccttccatattgcaaagttacaatttttatttgcttttgtctttttttagtagtctgatttcgagtacctcttaggagttacaaagctgtcaggtacaatatttctcttttaaagactgataagattttcccctttgaatatgctttttctttttaattgtgttacttgatttggataaataagctactccaattgtttggataatgaaataagatgcatatctctgagaaggagactgatttaattcctcgttttcatacatgctgaatatgccttcgtgattcataagagccatttctaatctgcattttgttagggtatttgtcttgcttctaaataaagagaatgaaaacctttttaagttaagactgcattgatggttcaaaaaataaattaaaataaagatgagattgtttaaatctttgattaataagcaagctcataaagttcttgtgaattttaagggaaatagttaaatggatttttcctaaccatttaaaagtctcagaacggaatcattttatagagtatctactggaaagaggaaagtgaatataccacagaagtctttctttataaataaatgaaatcctaaagtcatctgctaatgacttttatactaatgcttttatagttgtgacttgggtaaactgtttaacattttacagcccacggtttcctgttcttaatagtaaagcaaagctatttatttatttatttatttatttatttatttatttaaagtatcttggttttcaacaataaactgtgaaagctggcagctctttgttctaaatcttctgaatatagtccaggtacatttaattttctggaaagcagtgctttcaagtagaatagtgaataattgaatttcccatttgattttagaaaaaaaatgaattcccattgtttactttagscatctgttcatctcccttcttcactrttgtccccttcctgccctttcaaacaagccatagacttggctaactgtagactacagcttctcctcctctctctcaaatgtggaggctcrtagcaaactttgacctatcttcgtaggcaatgtgaaggagaaaagcaataagctctctgcccagagtcagcacattagcatttgagaaatcaggttatctgactttggttgattgagctgcctttgaactgccttagtttccccaaaatgatcaktctttgtgagatggaagacaaaagtgattcaaagacacttcattcagaagaaagcacgtaacgctaggtgtggaggctagtgcctgtaatcccagcactttaggaagtggaggcaggaggatggcttgagcccaggagttcaagaccagcctaggcaacatagtgagacctagtctcttaaaaaaaaaaaaaaattttttttttttttaaattagccaggcacaatggctcatgactgtagtctcagctacttgggaggctgaggtaggaggattgcttaaacccagcaggtcaaggctgcagtgagccctgagcaggccaccacactccagcctgggtgacagagcaaaaccttgtctcaaagaaaaacaagaaaaagaagaaagcacacagtttagcagtcatcccaattcctgcctatgtgccagtcaaagaatagtcagatgccaaagagctcatgtggtggtggagttttttttaaatagctttattgagataaaattcacatcccatacaattcactcattcaaaatgtgcacttcagtagctttttatatattcatacagttagcattcatccctacagtcaattatagaacattttataatccccccagaagatgccacaacccttagcatcaccgccaacttctcttcccccagcccttggcaaccactcatctactctctgtctctctacatttgcctgttctggacatttcatataaatggagtcataccatatgttagtacttaattcctttttatgtctgaataacatcatactatatggttttaccatgtttctttgtccattcacaaattgatggatatttgggttattctggctattatgagtaatgcttctgtgaacatttccgtacaagtttttgcatggacatacgttttcatttgtcttgggcgtgtacctaggagtggaattgccgggtcaaatggtaactatgtttaaccgtttgaggagcagccagactcttttccaaagcacctgcaaccactttacatacctatccacaatgtgtgaaagttccagtacgggctgggcgcggtggctcacaccagtaatcccaacactttgggaggccgaggcgtgtagatcacgaggtcaggagattgaggctatcctggccaacatggtgaaactccatctctacttaaaatataaaaaatgagctgggtgcattggcacgcatatgttagctactcaggaggctgaggcaggagaatcgcttgaacctgggaggcggaggttgcagtgagccgagatcacaccactgcactccagcctggagacagagagagactccatctcaaaaaaaaaaaaaaaagttgcagtacctccacatcctggccaacacatgttaccatctgacattttggttccagccccatttcacacccactggtatgaaatgctatctcattgtggttttggtttgcgtgttgattccagcctcatttcacaccagtgtgatgtctcgttgtggttttgatttgcatttccctaacggctttgatgctggacatcttatccatgtgcttactcacatattttaatattattagttacaatgccttgcaagctaatgcttgccaccatggtatctttgagactgttactcagaagtattgactgacatgtgccatgtagtaacccctggagctggaaggagcttgaggccctgcctcggtgacatacagggtaggaggaaggaaaaaaacactttaaatatatgaaataaagtgttcggggagctacgatggaagtgtgtgcggggaccaatgggaacatcagggtggaagggtttgattctgctggagagaagggacttgatcggggcaaaagagtcagagaggaggtgatggttcatctgtaaacaatgatgtttcagtcattgaaccaagaaggaggataccaggatgaataaaccacggctcctgactgtacggatagtgagcaggggctgttttgagtcttgattcttgacagttaagatgtttgaggccacagttgaacacagcgttcctgacctggtgtctttctcctttactgaaaccctcccaaatggggaacgggctttctcctatcactcagaaggggtgggatatcacaaaacaccagaatgagagctgtgcccagtggttccagaaactgctttcttgctgttgcttttgttgtagttgtggtttctgttttgaatgcacatttatatatgtatgtgtgtgtgtgtgtgtgtgtgtgtgtgtatatatatatacacatatatgtatatacacatatatatacacatatatgtatatacacatatatatacacatatatgtatatacacatatatatacacatatatgtatatacacatatatatacacatatgtgtatatacacatatatatacatatatgtgtatatacatatatgtatatacacatatatgtatatatacgtatatattttaaaaccttctagacaaaatgtgacttgtttttgttgttttttttgtgacagagtctcgctctgtcgtccaggctggagtgcagtggcgtgatctcggcttactgcaacctccgcctcccgagttcaagtgattctcctgcctcagcctcccaagtagttgggattacaggtgtgcgccacacgcctggctaatttttgtgtttttagtagagatgaggttttgccatgttgcccagcctggtcctgaactcctgagctcaagcgatccgcccgcctcagcttcccaaagtgctgggattacagcgtgagccaccgcacccagccacattgtgacttgtaatctttgatttatgagagatgaagtgactatcctaggtctgttgcatacatgaaagaaattttttcttttggaaaagtttattttccaatgaaatgtttggattttcaggatttttcattattatgattcattctttttctgatatcttctatgacattttggaggaaaagatgagcttttgggaaacatgcaaacaaacaaaaccacctttggtactaaatctcacctagaatgaatacttctgcattttaaaaactctccaagatatggtttaaaagatgagagtagaagtgaccttcaccaaccttgctagcccaaatccttatttatgtttacgaaatttgcaactctgacatgatattttagaaagccatataaaatgattttgcccattggttatggtgtttaatggcttaaggaaaaatatatttgtatcttgaaacttctggacccattccaacaagactgctttttcccccctttaagatatatgaggaagcgtgttgagaaatcagagctattaaatattatcatacaatttccttgatttcattttcttgcagataaaattagaccaggaatatagggttttctggaatgctttcatgaaaaaataggtgattgcagaaatgccatgaaataattaaatctcaattatttgtactggtgttttcttaaatgtaatttaacctgtcacaatacacatttttgcttatcagatcacttttattaataggattgagaaaatgttcactcttacttcctcctgctatgaatattgctctcctgttcaccataaatattccctttccttttcttctttctgcagatccatttagcgggcaaaatcagaacactgcgctatgtgtggcagttaatgccacaggtctgggagacccagagcctggtttctgttctagagtcactactttttagctgtatgaccttgagcaagacctttaagttctcttagggctcaatttcctcttccgtaacatgtaaagtctgttatagcacatatatccaagcactactttgaagaataataagatagtgcagaaaaacacacacagccaggtatctggcacgtgggaaatgccactcacgtaatgtgtaatcaccgtatttgtggttatgtctccttagggtaggaaaggggagtgtttaaattcagatccctcagactatcgagaaacatgtttgttgtggagatgactcactttgaaaacatgaacttcctatataatttgtaagtcattttcattggggagcatagtagtgagttgtagataggaattgcctcagcttatagttattgacagctttgcaggtgccaaayacagctctagggactatataatcactcttcagtaaccataggggattggttctaggacccccccccaccaccctctgcccaccttacaataccaaaatctgcagatgcttaagtccctgaaataaaatggtgtatttgcatgtaacctatgcacatcctcccctatacttgaaatcatctctggattacttgtaatacccaatatgatgtcaacgttatgtaaatagttgttacactgtattggttagagaataatgacaagtttttttaaaaaaaaaaatcttcacttgttcagtacagacgcagccatccattgttttttctttgagtattttttttatttggagttgactgggcttgcagacatgaagggctgaatatacttgcattctctactttagccttaacagcgaccctttaaggcaggtgctcttagtatgcgcatttggagaaccatgttccaagtctgttatgtagatttggaaactgagacacagaaaagttagctaactttcccaagatcacagagttaataaaggcagataggtaactctatgggctgttttgcatactgctcactttatgttatgtgagtgagagtgaatatgaaatacaaggtgtttgtcattttaattcttggaaggaggagaagtaaggcaataagagttccaatatacttgtttctaacctaattttgtatgtaatatataatttatatattttaagtcatgcattcattattataaataaagcttctgcccacaaagtactaagttaataatctagccaattttttaatgtatgagcattatttatgtactgaaaataacttttacatcttcaaagtatctactaggaatcattgaagcaaagggtagctatcatttttaaggcaatgatggtatttcatgtctcagtaacagatcacatcttccatgctcttctataaattgttatttatgtgtttgaagtcatccagacaaatccatatcacccccatagctgggcattactgagttcatatactgtattatgattattaaataaactagttctgtacagattcacaactgtccttcaaggtgatatctctacatagccgtgctgttttacaaatcccatcattatgaaaatattaattttttttgtctcctaagtaaagtaagcagtaaacacttgtacttatcaaaaaggacttgttaacatttcacctcttaaaattaacattttaattataagcattggtagttttttgttttgacttgttatttaaagaataagcatgaaattttactgtacataaattatacttcaataaacctggcttttagaaggcaaaggaatgcataactattggaaaggttgagactggcgaagaagtatgcataaattcaaaacggaatttacaaggattttgtttgatgcggtggttagtcttttggaaataggtttaagattagtgcttttacatacataatatatgatttcagggtccatttagagaatatttatctgtatgactagaagagaatgttacaaattgaattttaagaataatgctctaattttacataacgccaagcatgatgtttctttgtttacctaccatattaaaagacatgccatcctggatatcattaatggccaaaaaacttaagacgaaagtggctcttcccccagcatgcagcagacagtctatgaaaaatcactgataggaaaggttagagactcaaaaatctatcactggtaatagattcctattgctaaccagagtccaaggtgagaagctggcattggtgcagtttctgcctgcaagatgccctctgtgggtctccgcagagcagcacgttgtttttctacagcttctctggattatcctgtttggttttgcatacatttattaccatgtcccttgcctcttttcctcctccctacctgmctgccttagctcatctcactgtttttttcagtaacgttattacagagaaagtggatttcagtattcctctctatcaggtgatgcgtcaggtgacagagaaaatcagaatcagactgaaatcagactgctgcctgttatcaattccatctctgtttccatatcctaaaaaaatcaagagcagcaggatgtttttataaacctgtaataccaagtttatgaaagttagctgaatcttagattgtcagcgctaaaaggaatcctgtgggacacttttcacacttggagcagccagcttgtcagagggtcctgggccaggttccaggccctgctgccygctctgctacatggatcaggtttctgatgccttaccctgctcagagccaaactgtacaacccagcccgtgccttcctgctctcctgcctggatgggaagtcggtctgctgtgaaagtgggcacgactgctactggatgtgaacctgggatgaatatccctgggtagtagcagaagttgaagaattacccaggctttcaggctccaagtcacattctgggaaggcaggggctgttgttggcaatggaaatctggcctgagagtttcagagagccaggttcattaatgggcccacccaagccctggctgtgtgcttgtcctaataaagatgtacttacaacaaccaattccatatgcagatgtgagtgtgggtgtgtgaataacctttttaatttttttttttttttttgagataaagtctcaccctgttgcccacgctggagtgcagtggcacagtctcggcttactgcaacctccgcctcttgggttcatacgagtcttctgcctcagcctcccgagtagctgggactacaggtgcctgtcaccacgcccggttaattttttgtatttttagtagagatgggtttccaccatgttggccaggctgaaactttttaaagtcttcaatctgctttgaggaaacaaacaacctgaaaacataaccaattagttggtggactgtagtgttgtcaggtgattccatttgtgatcctagagcctgagtgtttattttatttcattttaagttccagggtacatgggcaggaagtgcaggtttgttacataggtaaacgtgtgccatggtggactgctgcacctgtcaacccatcacctgagtattaagcacaacatgcattagctagttttcctgacgtagagcctgactttaatggtggccatggtgggaacaatgatactacaagccttcttccctaataataatgctgtgggaggacccattgttcaattccattctttcagtcgcagcattgcctyagaacctgtttcatgtttatgacaggcccttggctaagggattcagtggtgcctgaagacagggagcttcataaatagatgtaagctcaaagcatggtgaatcaggctgtgctatgagagcttgtaacaggggacccaacagccagctgaacccctgaagaggggcaggagctaaccaggtgaaggaatgagaaggcaggtaccatccgggtgtgagcctggaaggcattcccagcagagaaaagcacacatgcgaaggccctgtggcagcagggggtaaggcccatttgagaaattgactatgcttggagtagtcaccagtggtcccagggaaggtcagaatgcaagcaggggctaccttattccaggcccagtggcccatgttcaggatttttatcctctagtagcaaatgtgaaagggcaggggtgtgatcagattgactttttgaaaagattgctttagactctgtgcatagaatgaggtggagaggccggttgctaggctatttcaggagccagatgagagacagtggaaactcagaccagggggatgatgaagaggttaacaaagttacttagggttgagaatttggcagcacctaagtgatgattagataagaggaggtgtgaaatatcaagggttgtttctcggggttatgctcccaccacaggcaaaataaatacaggatctaaaattaaaaatgcaattctaaatgaccagagtccagcatttatcctctttctctccctctccttccttctttctccttttccttccctctcttcccctgtcataatttttctgattttctggtttaaactcaggcagaaagattgggtacttctaaagaaactttggaaactttggcccataactttgtagatacccaatgctagatcggttcccattaatatgaaatggaattttgatatgaaacctttctaaaatatattgtctcatttatattaaaaagcatacaacttctgagcatttatttgaagctcgctggtgagataaaacatgagctggctgggttgtttctaggtgctaaaccaaatgtccgcttgaattgcggtgttgctgtaaatatttccaggcacagacagatagatgcaataggaaaaacctgaacaaattcttaggatgccaatattgtcacaaagtctccatgcagaatgaagttgtttgacaaagtgtttccctggtgatttggctgcagatgaaaatgtctttggcaataaaatttcatgcccgagtctcagctctgtgctctcatcagtcaacaaatgacatatcaaggatcccttttgctgtattagttaatatgttggcagaaatatgtgaaacattgttattcccctccagttctgtgcatagatttktttctacctttaaacccgcattaattgtaccaaaatattttgccagctataatttaatactaatcaataggattgccttagaacagagataaaaggttctttattacaagggttctcttacttcaccagtattagaagatataatagtaagggctgctgttttgccatcgtttgaaaatggtttgagggaaatttaaggattggtaaggcaattagtagtgaagcatattttaattatagtaactggataagctgctttcagctttatggattaatacgttattgtttaataggccggagtcacgtgtgattttgatcacacttctcactgtagccacagttttattagcagtggtgttttataacttaataatttatacataatgagttcagaagttccatttacatgatatccaagaaataatttaccccatacattaccactcrtcaacaggaaagaagtccttcaggatcacaacgaaataactgtccgagattgttttgcattaaaggatacttttaataatgagatcattttacactgcattatgttatttctgttgatgccaagtctgggttttacaaagtcatttaaaacacaggaggaagatgaatcacaataatttcacacatatttaataagcatgaattatccactgaagtctacatccattctttaagttgtgaaaaccataaggtgtttgagttaatgctctgttgtagaattttctcgtctagcgcggccctcctccgtgcaccccaccattcccgccaggcctcctcgcatttcagaagctgttatatggacgagattgagctgtgtgtattttaatgacacgtgtgtcatggtttagcttagggtttgcaaagcctctgtatatgctagcctctgggcatccattaccatctccgagaacacagtctcatctcatccaaaacgaacctctcaaagagccccctgtgaggacaccttggggcccctgtccttgtgcggaagcaaagaaactaacactcggtgattgactactttacagcagatgccgtgctagtttatacttgtcattttcctaaggattttttttgaactcataaacccactggggtttcagttctgcaaagtcttttgaggccacgatgtgtgatattgcagaatcttttggcggggatgatctgcgtaagacacaaggatgttaaaaggtactacacacatgcgcgcgaaaaaaaggcattacgttcaaatgagcttggaaaccttggcgagactgttttctgatatgcagttgtacatcatgagtgtccagggagccgacccagcttgcagcatttcccaaacttaattgaccatagaaccctttttggaagagtagcttaacttcaagttctttgcctataaaatatataaatctaaatcaaaatatatgaaaaagtacatcgctacaatcttctggccaccactcaaattttatcagggcagaaaagacaaggtatgttcagrtgatttacaagctggaaagtaccataaaaatgcaacagatgatgatttttttctcctttggtctttttggaaacagtgtggaagaaatgatgtgcccatgctttaattgttcagagtctagggatgcgggtactgttctttgtgttcctttattcttcctatccaactctcctctctgctaggaaaatcactttttttttttttgaggatccatattactaattgcagaaaattgccgttagtcagcgcttggtcttgagttctcattttaagtggctttactagtcatgtttacgcggtcatctaaatgctcactcttataatgcctagaatggcttctcttcataatggggccctatgattatctgtgtgttccctctgttttccatgctctgcttttccagcatggcctaaggtttactaaaagaacaaaactaaaaaacagggagtcttgtgtcttacacagatcatccccgcctaaggattctccagtatcacacatcatggcctgaaaagacttcgcagaactgaaactccagtgggtttatgagttaaaaaaaaaaaaaaaatccttaggaaaatgacaagtataaactagcacggcgtccactcttaagggagtcaggatgggggagcaaagttcactgcagattccccgctgcacaggttggtagatggcaggcccctgcgtaaaccccattttggtccaacctcctgatccctcctgtctaactagtttacactcayagtggcatgttcatgaatgtttactgaattaacagataactgtggatatcataaaagtgctctttttatttcatgtgggggcaagattgaatttcttcatggtttgatttggtgcagttgaaactgcttatggtggcttggagagcagtggcctcagctagctaatttgttaataatgtggtttatctgtaatgctttggttgcaggaaataaaggaacatgttccactcaatacaagcatagccgtttttttattattcattcatttattcagccaatatttatagtgcctgtttcttacaaaagggaataaaatacagaatccctgtcctcatgcagtttggagtctagtggggagacaaacagtgaacagatggctgtgtattgtgcccaatggtgggtgataagaatgtgaggggtaggggatgtgagggaaggagattgcgcagttatagcggatcaaagaagacctcagagacctaaaggatgtgcagaaatttagagaaagaatgtttcagacagtgggactggcaagtgcacccaccctgccccccagggataagcagcttcacacaggagagagctaggagacagatcagataggaggtctcctgcaccatttgaaggagtttggcctttgttcacaaggagacccgaaagcctgggtgggttttaagcaaaagagtgacaagatcagagtaattttttcaaaatgatcactgctacaaggaggtaaaaagggaagcgcagaaaacaggaggcaactgcaatcatccaggcaagagctgaaagtggcttggcccagagtgccaaccacagacaggatgagaagtcgtaaaatgctaggtatttattcgaagcgggagagggacagagtttggcaaagaattggatgtaggttgggagagaaggagaggagtcagggctcactttatattttagctgagcgacttgaagaatgatgttggcattactaagatgggggaatattgagagtgaacagatttgaaggagggggcagtttggggatagttaaaggtgagctgcctccagatatctaagtggagatattcagtaggcaggtggctctaggcatctggaggcaggattgagatcttggctggagatagagatgtgttgttggttgataatgatgagtctggaagagatcacttagcaagtgagtataaaaagaagagaagtacttcatacaccaagcctggaggcaccagcagcaagagaagagactagcacaggaaactgaggaggagcagccagtcatgaagaaaaccgagagggcgcagtgtcctggaaaccaagggagttgagtatctccagaagataaacgttgttcgctttgcccactgctgttgatgactggagtaacattaagagggagaggttgcctttggagttgaggatgtggaggtcctagcaaggccaggagctggctttggtgacgaaatggggctagaagcttacccgtgatgggtacaacatggataagcccttgaagagtttattccaagtgaaggcaaataaattgcaattgctggaagaggatgtagggttaaggaatggtgtttttaagaaaggcagtagcacaatgtgtcttttgtaattgcagttggctaacagagtggggacaatgaggtaggagataggaccagttgctgggacagtatcattttgcagagaaaagggattgggatcttgaatgccagtggagggactggccttggccagagtcccagcgacaggggaaaaggcagaatgtatagtagcagcatggtaggctgctaagggtgtggggaccagacagaagttctctttggagtgtttcggttttctcagtgaaatacgaagcagggttatcagctagctgagagggaggatggaggagaaagtattatcatattagagttttgcagagagaggaaaggatatgaaatagttggttagcagagggatagagaatggactgaagaagaaaagtagaaagatgataattcaagaggtgataactcaagaaaattgaagtttctcttctcattgctgcatcaggagaatttggtttggatattggcaaaagcagccaatattccattgcacatgtataccacaatttgtgtatttcatttgcctatattgggcatgattgttatttccagtaggaggctgttacgaatacagctgctgtgaacattcatttatggacgtccgttttcttcccagaagcagaatggctgggtcatagaataggtatataataacttggtaagaaactgccaaacaattttctgaagtagttgttctgtaaaagtaaccaggcaaatgtttcagccctgaagatagaaaatgagctataataaatgaaaagtagaaatttacaagttagaaatttagatagaatttctatcactatagaaagtcagcttctgtcgtttctacttagccacagctaagtcttagcaaatcttaggaacatcaccgaacatccatggactcaatttccttaggtaattgaggtaactgggtgacctgtaaggtcccttccagaccccacattctttgatttttggtggaattgtgccaaatggtaatggatagaaagacacctctgtgtacatttttatcccatgggagttgagcagcatttaatatactggacacagtaagaaaaaatctagaacataagatgcagaggcaaaaggatgaggctgctacaaagtatatacttttgtgtgaaaatcacatattctttcaaaaaaccattgtaaggtgatacaggactctactcgtgtgtaaaaagttatatacctatgaatagctccaattctgttttaattataacaaataccgggagatgcatttggatggtttgaggaaaaaaaggttgcgcatccactgtttggaatcttgtggcttgttttgaagccagcgtaacaaaacatttgcctctattacttttgcagtactgctgggcaagtgttttgtctgcctgggctctctctagccaggagagaagaaatttctgtttcctcccaccagacagagtcggtagccccagggccatctttgcgctagctctggtctgtaaatgtatctaaataagccttgctataaatctttctctgttaatcttctagctgttcccaaacttcagcactgcctggtgaaggtgtacttcgccaaagactgaggagtcatggttcacttggtggaagctgtctgataaatagaggatgctggaaaagacagattgaacgtcagtgtgagatcgtgcactgccgtaatctgtctttcaggttaatgagaattaggaattgggaggggaaaaccagttggagatagctccraaccaggtggtgatcagtggtggaggtagatgtccaatcggtctcggtcacccttyggggtccaggggttgtgagatcctgacccacccagggcaggacaaatgccctctgcttgtcactgcctttttggaagggactctgaggagtgtgagcattgaaaagtacacagaagcccatggaatcgtggagttaagacagtggaggtcacttaggccaaactcttgacctgggtggagtccttttcacggcctccctgagctggttgtcgtctggcccctgcttgaatacccccagtgacctgggactcaccacctcaacatagtcactgtataggactcaggcattccagaacattccttgaggactcagtctcaccacaccagtgctgaataacctttcttccatgataagaagaaagactaaagctagcttggggtaacagctctggatgtttttttttcctctccccaggtggggatgggtgttggacacaataagcattttatttctgttttttcttggaggcacaaattaacattttttcctacccaggggccatcataccctaagctgtgctgatttttaaattggtctatagagacaactcgtttcccatgttcggctgatgctctccatagctacccaaaagtccatttatttgtaactctaaagcaatgactcccagccacagcaatttcacacacacccccactcccgctggggacacttggcgctctctggagacactttggttcccacagctggtgtgggggtgctattgatatccagtgggtaacagccgggggtgctgataaagaccctacagttcacaggacagccccccaaaacaaagaatgatttgacccagaacatctcagtgccaaggctgagaaactctagtctaaaggtaccataaatagccaaccagtaggaccatctgcatttatatttgtcttcagggtttttttttaaattttgttgtttgagatgggatctcactcaggctggagtgcagtggcatgatcttggctcactgcaacctctgcctcccaggcttcagagatcctcccatctcagcctccctaggaggtaggacgtgtacagatgtgcaccaccacacccagctatttttttttgtattcttggtagagacgaggttttgccatgttgctcagtctggtctcaaacccctgagctcaagtgatatgcccatctcggcctctcaaagtgcttggattacaggtgtgagccaccacactcggcctgtctttagggttcttacagaagagtttgtgtagaagcaagcagtttgctgtagaaagaattcgtggaaaatcaggtgttgtggggcatggtggttgtgataggatgcaggggcactgcagtttgccagctttcaaccataactttcctcacagattggtggatatctttgaatcataattaggagcttttttttaaaaggtctctcgggttttgtaagacacgtccaacttattactaataaaccaaggaggtatctgttaccttcaattagaggagaagacagcacggagtcccaatcaaagagttttaaaaggccttgttttttcaatagcttattcatccagtttaagaaagcaatttctttgctgtagtttatggagaattctaaatctggtaaatcgtttattgcttcataggggtttgctttggttgatctcatgtatgtaccagggaagaccaaaaatattttttttgaaaaaacatgtgaggtcatgttttttctccttgactttagaagacaaagataatgatgcaagtgttgctatatggtggtgagatgatgacagacagaggcactgggtcattcccacacccgctttctggggtagggcccatgctgagagaggaggtggaagagcttgtcagtcaaggcagcagctaatttcactgagctccaggactctacggactcttccagaatcaatcacatttgccatgaacatcaggtccccttgtcccccatccccatgaccgagaccaatccaaacttgaaaatggatgaaatcaacatttctggggtgccccctctgtgctggccttatctgtggcttggtacaagatcctagaatgggaacaagaggtgtgcactccttagggacaaagaagttggggcaaggaaggagtcctgggcctaccatgtgctgtcacttggcaacataagaccagcagtataaacaaaggactgtgggattctgaattgtcccaccaggtaaaatcctctttttcttttctggcttgtaagcataatgattgagtgacacttttcacttttaaaatgaaaatggcaaaacttaaatgagggagtttttgttaagtcgtggtggcccagttggagtttaaagatgttctagggcacagtacagggatcctcctccaattgtgtgattattttttcccccatggtaaaagtcacgccgtgtttcccctccttgtgaggctcatggaaacacacagccgaggttctgatggtggccaccgctggacaagcgcactctctgagatgtggccatgtccctgccgtgctaacaggccccagtgccagtgcgccctgggcttatttgtggcttaaatcatctcagcaccctgaattcttccctctggagacacgctcggaaccgtccccccaattgatgacattgcagctgtcatgcaagagcttgccttcacatctctcctgtggaacgtgacagttttctctgtgatggccaaattaattattagaaatggtttgctagcagacagttggatgctgattacgattggaaccttagggaccctggaacccaaatgtgttgatgtttgttgttgctgagaaaaatgaaaaaccataaaataagaaagaaatgtttttaaactgaaaacaatgcagattaagccaggaaacttttggactgagttaactgagatctgagtgaaatctacccaaacccttgctcgcagtgagaaggtttagagaagtggttaattagttgctactttctgttagagaggggattgagcttggctatttctatgtaaagcaaaaagactggcattgattaaattggagatgacatttgggaggtgttctcagaatatctaagtttgattatctaatttgccttcatactgtgtcctgggtttgtgaagcctttctagcaagtaccacccaggaagaaatattttcaattaaatggatcatgaccactgcagaaggaatcatgaaacgcacctgtagcgtggggtcatggtgtgaacaaagctgccaggctcacaaagagacagtctgggagtcggctgtgctaatgccagctttgagcatcatttcactccttcccatcaacagttccattaatgagatacagagatgaaggcaggcagatacttcatggagctgtgtgacgcaagattgatgctgtcaccagctctcattggaacgaataagaaagaggccgacagacccttgatcattagaagggctgataatctattgtgagtttgtcaaaagaggaggaagaagatcaaatattagtggagaaagaacacagagtaaagaacacgatggaaacttcctaatcattttgtgtagttatgaaatgggtagctttatttagcaacacatatgatatgatacaggcaatattccaagcatgcattctagagtaatctttaataaataagtaaacaaaggccagggcggtggcttgcacctgttgtaatcccagcactttgagaggccgatgcaggaggatcacttgagcccaggagtttgagaccagcctgagcaacatggtgagaagccgcctttcaaaaaataaaaaaaaaaatttaaaaactttaaaaagtaaacaaagagcatccataaatacttttttggggattccgtgggattttttaatagtcatttttttctcaaagagagttaagtaatttataatttcttgttaaatgagggtggctgttataacagtataaaaaataagttttgtctaatgttgcagctcaatcgttattcatcatacaggactgtctggtggcagacacagaaatttccccttagtgtyacctgtggatgcagcaggtcagtgagttcccccacttcctttagagacacgtgaaccactctaaatactgtcatttctcagggaaaatttacacagaggtaatgacagatacataaattccattgttccagagcagaacaagtatggttgagggaggaatgatgttataagaaactgctttacagtccctgagattcttttccaattacatttagggttgaattttcagatactttttgttgcatccaaggaaggaattttaggggaattatatttattaaatctcatttttctttgcttcatccagcttttccttgatacttttaattcttaccatgcagtaattcagtgacctcaattctccctcccctgagccagaaaggaaagccctctgtgtttaaacagactcagagcctcctgcctgtcctagttctgcagaaaggaagctgcacctttacagagcccctcttggcacaggtagagattggcagttcggtcctgttcaaaaggttaaggagggtaggggccggttcagcagcataaacatctgatactcaagtagggtctcccaaacagcagcatcgatatcacctggtaacttgtcagaaatgcagagtctgaggccccaccccagacccaccgcatcagaatctgcatgtgcacagggtccccaggcaattcctatgcacactgaagtgtggagagctctgcaggtctagcaggctcccaggcagactccaagctgatagacacaggaacacagcctgagtttcactccatggcagcggtgttgatagtgctgtggccaagagtgatgcatttgaggaatatatgaggaatggaggacagtgaggagggatgaaaatgacctgaacacacaagcaaagctgtaaaagtgaaaaatctctcttcatggaccttgctgcttgtgtggttgagggagaatttttttcccaccgttggagaagaaattcattctacattgattgactggaaggtcaaacaatgaacgaaaagtaagaattaatttaaaaaaaggagagagagagggaggcaaaaacttaattataaaccaaggttctcatgttcggctaaactacagggcactttgccccatattttttccctgtaagttcacatttcttataaaacaactacaaagtaaaaaaatcgtatgtgtcatataaaacaattatttgtgtctcttgttgagaaaaaatatacagcatgcattaacaaatgcctttcctttctcatgtagttgtttattgagtttaaagtgtaaaatttcttgcagtttgtttattctaactaataagtgaacttgacacctcactttcacagaaagttaaatgatgtggtcagtgatgtttttaagatttatatcgaaagaaattaagtattaggtacacgacttaaattgattagaaggtaaatcgaatctactgagaagtgtgagcatataagtatgttagcacgtggtatgaataatgtgttctgatatggaggaagatgacatagtctttgattttataatgcgctgatattcttacagaaggtcaaagcaaatcaaagtgttgcaagaatgttcaaaactatccaccctaacttctaggatcatgttctccaaactgctaattaatgaaaagtcagcttcatatattgagatgtttaatcaattggcagattgttgtcaataaatatgtgtcgtaagtggtttgtaatagacaggctaatgaagtaccctctgtgagtgtcagagctatttggaaaaatctctctcccttctgggcggtttgccatacgttattagtctccctctaactcaaggaagagtgcccttcaacatcgctggtctcgcctctggatggaggagctggagaagcagaaagtaaatttcattttctactagcagttagtcaagcaacaggaggcggaaagaagggtggctactgataatattaatgatcatcagagaagccaacatttcttaggcagttgcttctatatgtgctggactccgcagtcagtaccataattcggttacttcttttttttttttttttttttgtattgagatggagtttcactcttgttgcccaggccggagggcaatggcgcaatcttggctcactgcaatctctgcctctcagattcaagcgattctcctgcctcagcctcctgagtagctgggattacaggcatgcaccaccatccatgcctggctgattttttgtatttagtagagacagggtttcaccattttggttaggctggtctcgaactcctaacctcaagtgatccacctgcctcggtctcccaaagtgctgggattacaggtgtgagccaccatgcctggccaataattgttacttcttaatcttcactctatgagaaagattctgcaacctctcagatccttcattacaaacatttttgtcatgccactacaatgctgaaatagatcttgtagctaacataacctactctacacgtaattgttttaaaagtcattataattccccaactataacataatgaagaaataaagggaatagaattgactgttgagtacattcaatatataagttacttgtttctggctataacggagggaagtaatagacatttgcatctgtgcatagaaatcctgcgaatctaacagctgtaactgcagactgatagcgaagtgatgttctagctactcacactagaactggtcgtcctgtcagtgaagtgatattataaattggtgaatacttcttagaaaagttccccaaattcagtctcacctcatttgcacaggaatatcagtatacattcttactggccagaaaatgctttgcattcacatataaaacagatttaggttctaggcacaaatatttgtaaacaggattttcgtttccacgactacccactgggacatcgagaaggtatgcagcctgggagaccactcccaatgctccaggcctggcttattcatgaaagacatctggcatccaaaccttcattcaataaatactagtagaatcccccatacatgagatcgatcatgaactgccctatagatttccaaaagtctacagtgaagcgttgccaccccatgagaccaggccactaggattttcatttctccttttcagatgtggcaactgaagcttcagtagtttccccaaagacaaagagctaggaggtagaggagttgggattcagactctgatctgtctgaccccagaatctctgcatttaacccactgttccatcctccccagtgcatccagacaggccaacattgccacagaagagcccgagtaggcttactggatcattttttagaattgtgcttatgaaaaggaaaaggattgatcaggcatggtggcgcattcccataatcccagcactttgggaggccaagagttcaagaccagcctgggcaacatagggagaatctgtgtctataaaacataaaaaaacaagttagccaggtgtggtggcatgcacctgtggccccagctcctcaggaggcctaggtgggaggatcacttgatcccaggagttcaagaccagcccagacaacatagggagaccctgtctctacaaaaaatttaaaataacaaattagctggacgtggtggcatgcacctttagtcccagctattcaggaggcgagatgggaggatcacttaagcctgggaggatgaggctgcactgagtcctgatcgcatcattggcactccagcctgggcaacggagtgagaccttgtctcaaaaaaaaaaaaagaaaaaaggaaaaggattggttgaaatgcactgagcgcccatcccatctcttgccagctgtaataccatgccccagtgttttgtgtatgttaccgaatgttcacaacagccctgcagtgtagttagttgtgagtaatcccttttcacaaacaggaagcctgagtctgagccctttccccagtcaaccagcctatgagaagaactggattgatttcaatcttgtgttgacttcaaagcccaacctcttgctcctactccttagaccagaatgggccctcaagaggatgggtgtgtataacctgttgatgccattcacccacctcgtcttgatttccgtccactttctttctcattacctgataagtaaggtgagcaaataatttattggccaggcaaagacatttttgagactgacaggggacacttccaccaggacattgatgtgggtcactcagtgatgcctgtttcagggccttgaagcaggtagcagccttaccaagtcatggttgatgcttctgtacagagttggaaacgtgtcgtgggtttcccgatcagaacgcactggggaccctgccgtcacaggaacaccgctttgcttctttcagtgaatgcatgattatcttgaggatggtgagatttttctgttgagatcttttctagtttaaaaagtccccactgttttcgtgaggcagggataggtgagcctccggccatcatgagagtgggtaggggcgggcctggtgaagacaaaccagaccccacgagacagaagctcttcccagttggtgactgggagagagtctgcttcccaagtccagtctggctcacttcctctcaggagcaggacaagagaaggcttccttcagcttacatgaaaagcttgcagtaaaagagtacaagtgacggattctgcctgaatttccccaagtttctgcacttgtctttgtttattatattaataaatactatgcagctaatgttcccatctggcagggcagagaaaagagcataaaaatgaagttgtggctacatcacttaaatactaatgaaggtgatacccacttggcatggtggaaaggtgggtctttattttagagttcttaattaagaactgcaaagtgactaatattaattaggaagccagctgtagccttcagtttcatggtatatttcttcttaggaacctgtgacgggagtcagtctgaactttttttaatcaatcagcccatgagcaattacctattaaatataccttgtgtgcatgggaccagactatgtggacagagatttgtaagattctgtctttgccttcagaatctccacctaatcaaagagtgtgcacagatagagagccagtatttcagagagagaggtcaaagcattttcacaacactatgagtgaataagagaagtgtcgcattatgggggtcagggagcttttcaaactacactggtgcccttcctgctctggggttgcagtagtgagctagtgtaagtgatgggagggtatcatacccctgggagtctggggcacaagggtggttacggaccacctggcaggctgaaagctggagttcagagggaggattgacagtcatgggcagaaatagttgggatggckagaactgggctctcaggaggagggatcatatttccaaaaggtgaggagtgatgggcagccacagaggtggaaggaaagaggttagggcagtgggaccagaaagggaagtaactggcattgagctgggatgtctactccagcccttcagctctcagtcggtctaccagccattacattattgatattgttgactctgttcacacttacagacacacacacacatgtgcaagcttggcctcctgcagggacctgataccctgagctagagggcggggaagtggtcaaagaggggactcaatacactatgtgtagttgacatgaccacccagcacgtcataaaattgtacctagaacaatacctagttatgggtaatccctttttacaaacagaagactgaatgtgagcccttagactgagaagcagaactgggtttcatactcattttgacttcagagcccaaggtctaagatctaaggagccaggagcaagagctcaaaaagaagcaccttaaaacctatgttttaatgtctcttgacactgatgtattaatatccactgaattctagtttcttgaatctcttgtaactggagaagggttttatgaagataagttgtaatgaggggccaacaaacatgaaaaaatactcgacagcactaatcattagagaaatgcaagttaaaaccacagtgagatactatctcacaccagtcagaatggctgttattaaaatgtcaaaaaacaacatgctggcgaggctgcagagaacacggaatggttatatactgctggtgggaatatgagttagttcaatcactgtgaaaagcagtttggagattactggaacttaaaacagaattaccattcaacccagcaatcccattggtgggtatatatctaaaagaaatcattctcccataaagacacatacactcgtgtgtttgttgcagcactattcacaatagcaaaggcatggaatcaacctgggtgcccatcggtgctggatttgatgaaaagaatgtgatgcatatataccactgaatactacacagccataaaagaatgagattacatcctttgcagcaacatatggagctggaggccattatcctaagcgaattaacacagaaacagaaaaccagattactgcatgttctcacctataagtgggagctaaacattggtcttcatggacaaaaaaatggcaaccatagaaactgagggctactagaggcaggtgggagagagggagcaaggtttgaaaaactattgaaaaactattctcagtacatggtcaatgggttcattagtaccccaaactcagcatcacacattttgtccaggtgacaaatctctacatggaccccctgaatctaaaatgaaagttgggggaaaaaaaaaagattagaatgtactttttcttgatttacacagtgtgttaattattacagtttttttcaagttgagttgtagtctcacatgcagctctctcctaatttcatacttagacattcagatcattgaattgtatctgcaaaattgcagttcttttaaattagcttgccagagcgctgtgggtcctgttcaggggccctgaggccaggcagtctgtgactctgcttgctccttgataaactttcatgagtagcatttattttaaatcatccaagaacacctcaagggcaaggatccttaaccttgatcctgggccgtggtgattcacaaaggcttatcctttgtagatttaggctcatctttcagggagctcagtttgatatgcttttctctcctcgaactctgccattcaacattttttttcccatatctattctcactgagtgctaattttagttcaggttgcacctgtgtgtatgtgtgtgtgtaaaccctctgtagccctagtttatagcctttttcaataaaatcacatatccagagaaattgtttttccacatgagcactttttcagagtgttttccagaactctgcctgctgttctaaagtcaacatcagttgccctctttagaacgcttccctaatgcaatggttctgaaatccctgaatatattgttacaagcacagttctcttcagaaaaagaaaccttggaaatggtggatctatgcttttgtttttcattttggagcttggagaagtttgttgacctcacgtcatcatcagcctccagttgaatctgttaaacagccaatgtgaatagtatctatataaaaacacaaagtaagcacagaaacactttttcaggggaggtattttgtcatattgaaacagcacctgtattggggttttaaaattttaatttttgtgggcatttagtaggtatgtatatttatggggtacatgagttgttttgatacaggcatgcagtacaaaataatcagagcatggagaatggagtatccattccctcaagcaaggcacctgtattgttataatgtttttcctttaataagttcagttctcaaatttatttctaaaaaactatagcagtattctaaatgaaaactaggtttaatttgctatcaataaaattacatacatagtcattgatatggtttggctgtgtccccacccaartctcatcttgaattgtagctcccataatccccatgtgtcgtgggagggacccagtgggaggtaactgaatcatgggtggcaggtttttcccatgctgttcttgtgatagtgaataagtctcatgagatctgatggttttataaagaggggttccccagcacaagctttcttgcctgccgccatgtaagatgtgcctttgctcctactccaccttccaccgtgattgtgaggcttccccaatcatgtggaactgtgagttcattaaacctctttttcctgataaattacccagtgttgggtatgtctttcttagcagtgtgagaacagactaatacagtcattaaaattgacaacttgcatcagtgtacacatagaatcttctcatacaacacctttgggaaccactactggaaggaaatgttacatttcagggactgaggctgggtacgggaaacagagccagtgtccatagtgttaatattcgtaggggcctcagatttaattttacctgtaagtttttcttacaccagaaattttcagccttagcactcttgatgttttgggccaggatgtcctgtgcagggtggcatgttcagtggcatccctgatctccacctgctagatgccaataacacacccccacaggcgcccaaggtgtgacaattgacaaccaaaaatatccctagacattgccaaatatcccctggcagaggcagaattgcacaggttactactgtgcctgtgtcacaaataagtcacacataagtcattttgttgctttaattcttctgtgtgtccttggtcttaaactgttacttggttaagtacgcagattgaaaaaacactgcaagggaattttttagagtctctctgcacctattctggtttcaggactgcccagtttgcattgttgttcaaaatggaaagaagagagggaggaattttttacaaaataaaattcactaccatttttgagacttttttttttttttgagatggagtctcgctctgttgcccaggctggagtgcagtggcgcgatctcagctgactgcaagctccgcctcctgggttcacaccattctcctgcctcagcctcccaagtagctgggactacaggcacccatcaccacacccagctaattttttgtgtttttagtagagacggggtttcaccgtgttagccatgatggtcttgatctcctgacttcatgatccgcccgcctcggcctcccaaagtgctgggattacaggcatgagcgagacttttttttttttttttaacattttgtacatatgccagtaactcccctcccgcaaaaatggaagattgtcttgacctctcgtgagacctgctgaggccacatctggttcccccactgtagaggtgagttaggtctccccactgaatgtcagttcccaaagaaatctcatgtgtaaatgaaagagcagatcctccctcccctcctcactgttttttgcttatatgtagatgtgattcctttcaagaaaactccgtgagaaattacttcactatcatccactattgacatcaacagcagcctacattttttcaagatacttaaagtgcattttcgcttttaactttcacaacactttaatgttgctggttaatattattgatccctacttttttatgagaaaaactgaacctcagataggttaaataacctgctcaaagccacaccactgacattgctattctgataaagcagaatatttgaagcagtttcccccaaaacagagcaatgttcacgttaattatgaaacatagcatgaattcataggtagcctgtcaataattatgagtatgtggtatactgatgtcataatttttatataaatgtataaacctgttggcaccctgtgattgttactggtttgtttttttaagtaccttggatgaaaacttgaaagaaatatacgaaaatagaagcagaagttatgtttaagtgggatacttctgcagttttcttttgaactcccttgtgaatttctaaatgggttgcaatatatttttacttctttggaaaatgaaatttgtaagttaaaagtgaagggagatagatatagctaacataactgccaaagttgctttttctctgtaactctagctaagaaatgaccatattctgtccatgtgtccataagtctaggctcaggagtctttcagagtttatttgatgtaccattgagctgagggctctgtcctgccaccttttgttcaaggaaacacacgaggcacttccttagggaacccagtgaagatacctactgatgggaagcaggacagttgattcattccctctgtttctgttttaatgctacactggggtgagattaagtggtacctcccaagagaaagagcagggaacccgatgtgcctagattggttcactgtgaatcacagcagttgttcccgttgacatcacagaggggacattgatggtagatcatgtcaccatcagctctccctagtgaagactcctatctggaaccacgtggagaagactgtgaggtgaaaacatgctactctctgtcacatactgccaggtagatgcttgctgctggcagaaggcatagaatattttgtaaactacgtgagtattctatcaagtaatatttttctgaagcaggcttccatctgtcttgccattcatttttaatttcttagcacttcatagtagacgtgttttgagtattttggtcagaattgtaaacattgtcctctaagggaatcattctcaatgaggtgctaagtacctgatgttcagtcctcataactactctattaggtagcaggtggaatgcccattttatttataatttttttaaagttctgggatacacgtgcagaacacacaggtttgttacataggtatacatgtgccatggtgatttgccacacctatgaaccatcatctaggttttaagccccacatgcattaggtatttgtactaatgttctccctttccttgtcccctaccccaccacgggccccagtgtgtgagttcccctccctgtgtctttgtgttctcatcattcaactaccacttatgagtgatagcatgtggtgtctggttttctgtttctgtgttagtttgctgagaatgatggcttccagcttcatccatgtccctgcaaaggactttaactcattcttttttatgggtgtatatagtattccatggtgtgtatgtgccctattttctttatccagtctatcatcaaagggcatttgggttggttccaagtctttgctgttgtaaatagtgctgcagtaaatatacgtgtgcatgtgtctttatagtagaatgatttataatcctttgggtatatacccagtaatgggattgctgagtcaaatggtatttttggttctagatccttgaggaatcgccacactgacttccacaatggttaaactaatttacactcccaccaacagtgtagtagtgtgcctatttctccacagccttgccagcatctgttgttccctgacttttaaataattgccattgtaactggtctgagatggtatctcattgtggttttgatttgcattctctaatgaccagtggtgatgagcttttcttcatgtttgttggctgcataaatgtcttcttttgagaagtgtctgttcatatcctttgcccactttttggtagggttgttttcttcttgtaaatttacttaagttccttgtagattctagataatagacctttgtcagatgggtagattgcaaaaattttctcccatttgaaggttgcctgttcattctgatggtagtttcttttgctgtgcagaagctctttagtttaattagatcccatttgtctattttggcttttgttgccattgcttttggtgttttagtcatgaagtctttgcccatgcctatgtcctgaatggaattgcctaggttttcttctagggattttatggttttgggttttacatttaagtctgtaatccatcttgagttaacttttgtataaggtgtaaggaaggggtctggtttctgttttctgcatatggctagccagttttcacagcaccattaatgaaatagggaatcctttccccatggcttttgtcaggtttgtcgaaggtcagatggttgtaggtgtgcggtgttatttctgaggtctctgttctgttctattggtctatatatctgttttgataccagtaccatgctgttttggttactgtagccttgtagtatagtttgaagtcaggtagcatgatgcctccagctttgttctttttgcttaggattgtcttggctatatgggctcttttttggttccatgtgaaaggtaaagtagtttttttctaattctgtgaagaaaggcaatggtagcttgatgggaatagcattgaatctatagattactttgggcagtatggccattttcatgatattgattcttcccatccatgagcatggaatgttcttccatttctttgtgtcctctcttattttcttgagcagtggtttgtagttctccttgaagagttccttcacatcccttgtaaggtggattcctaggtattttattctctttgtagcaattgtgaatgggagctcactcatgatttcactctctgcttatctattattagtgtataggaatgcttgtgatttttgcacattgattttgtatcttgagactttgctgaagttgcttatcagcttaatgagttttggggatgagacaataaggttttctaaatatgcaatcacgtcatctgcaaacagagacaatttgacttcctctcttcctagttgaatactttccttctcttgcctgattgccctggccagagcttccaatactataggagtggtgagagagggcatctttgtcttgtgccatttttcaaagggaatacccgttcagtatgatattggctagagtttgtcataaacagatctttttgagatatgtgctattaatacctagtttattgagagtttttagcatgatgggatgttgaattttatcaaaggccttttctgcatctatggagataatcatgtggtgtttgtccttgattcagttaatgtgatggattacttttattgatttgcgtatgctgaaccagccttgcatcccaggggtgaagcctacttgaccttggtggatacgctttttgatgtgctgctggattcagtttgccagtattttattgaggattttcacctgttgatcttcatcaggaatattggcctgaaattttctttttttgttgtctctctgacagtttttggtattagcatgatgctggcctcataaaatgagttgaggaggagtccctctttttctattatttggaatcatttcagaaggaatgatattagctctttttgtctctggtagaatttggctgtgaatccatctggtcctggggttttttttttttttttttttttttggttggtaggctattaattactgcctcaatttcagaatttgttattggtctcttcagagatttggcttcttcctgctttaktcttgggagggggtgtgtgtccaggaatttatccgtttcttctarattttctagttttagtagaggtgtttatagtattctgatggtagtttgtatttctgtgggatcaggggtgatatcccctttttattttgtctatttgattcttctctttttctttgttagtctagctagtggtctattttgctaatcttctcaaaaaaccaactcctgggtttactggtttttttaaagggtttttcctgtctctgactccttcagttctggtctgatcttatttcttgtcttctgctagcttttgaatttgtatgctcttgcttctctagttcttttccttgtaacgttggggtgttgatttcagatctttccagcttactgatgtgggcatttagtgctataaatttccctctaaacactgctttagctacatcccagagattctgatatgtcgtctctttgttctcattggtttcagagaacttacttttttctgccttaatttcgttatttacccaggagtctttctggagcaggttcagtttccatgtagttgtgcagttttgagtgtttcttaatcccaagttctaatttgattgcactgtggtctgacagactgttacgatttcattcttttgcacatgctgaggagcgttttagttcaaattgtgtggttgattttagaataagtgccctgtggcattgagaagaatgtatattctgttgatttggagtgaagagttctgtagatgtctattaggtgcacttaatccagagctgagttcaagtcctgaatatccttcttaattttcggtcttgttgatctgtctagtatggacagtggggtgttaaagtctcccactactattgtgtgggagtctaagtctctttgtaggtctctcagaacttgttttatgtatctctgtgctcctgtattgggtgcatttatatttaggatagtttgctcttcttgttgcattgatccctttaccattatgtaatgcccttctttgtcttttttgatgttttttagtttaaagtctgttttgtcagtgactagaattgcaacccctgcttttttttttctctccatttgcttagtaaatattcttccattcctttattttgagcctttgtttgtctttgcacgtgagatgggtctcctgaatacagcacaccaatgggtcttgactttttatccactttgccagtctgtgtcttttaactggggcatttagcctatttacacttaaggttaatattgttatgtgtgaatttgatcccatcgtgatgctagctggttattttgcacattagttgatgcagtttcttcatagtgtccttggtctttatattttgttatatttttgcagtggctgttacaaatttttcctttccatatttagtgcttcctcaggagctcttgtaaggcagggaatgcccattttagatatgagtaaatgaggctcagacctgttcacgattcttgcctcggtggctctgcatggtgatctattccttagtgagtcctcttgaatttggggtaagtctatttattgtctgtcatctaaggcagcttgctttttgtcttctggtgcatatcaaaaagtggctgtttcctcttttaaaagcttatttttaatttttgtgggtacacagtaggtgtatgtatttatggggaatatgagatactgtggctcaggcatgcaatgtgtaataatcacatcttggtatattgggtatctatccttttgagcatttgtctttgttacaaacaatccattgatactcttatttttaagtgtaaattattgattacaattctcttgtggtggggggactatagtgcctcatttaattattgttcattctatttttttttttaaccattaaccattgctacttttcctcccagccccctactaccccttccagcctccggtcaccatccttctmctctctatctccatgagttcaattgctttgatttttagatcccacaagttagtaagaacatggactacctggttcttgatttaacatctacaacattttcagattatttttgcttgtttacagtttttatatgttatacctaatttgaaatttagatattggtgaattaactgctaagcatgattatttccattaagtacgggggagctttgcttacctactttgtacttcttgttcctaaatgttagggttatatagctcatctcagcactaacattattccttacccatgttttgaacttttatttttctggcgttaatgctattgcccacaatccctgcgagtacccctgaatccgacccagtagttttgccttgtaacctccaattcccaaggaatatagcctggcaatagattgtttcatgtatttttacacacatgtgatcttcatatccatcagtagttagtcttctgcactcaccagaagcaagatgtcatgtctggggaaaggtttgttttttttgttttttttttttttaaagagctgtagacattttaataaaagtttcttctcagcttttctctgatgcatatcaggaggaaagtatagtaacagagaatatagcattactgcaacatgcctgtctgaatacatttcagttcattgagctagatttccctgaaaagggaacattcccagccaagtctgccctaaaatcacaaccaaggtggcaagcccagattcttgatgtctgccagtgtcatttttgtaatattttattctccagcacagtggcaaccaggatcagagctaatagtctaatcaaaacgaaagatgcccaggctcagatggggatgggatgaagccctacaccaagttagagtggtgaagtccactagtgtttctgaacaaggtgccgactcttggcatgaacccacacagtctctgaaccattgtgctggtcatgaccactgaggcgtggcaggaaggtggtctctgtggagactcacagcctgcttacaagcaattccaggagcaggaagcacagagacatatggaaattccactctcatgcttaatatacaacgtgcaaaatgaatttttcatattggcttttttaaaaaatggaagagttccagctttgcctcactggtgtgccttttggagttagtgtcctttaaagcagccagagggggaataactgtaatgtaagcagagtggtgtttgcaagtgagagctgggggagaggcgatgatgattttggaaacattattctgggtgttgaattgaacaaagagttattactgaaggaaaaaatacccagaaatgcattgttaatgctctctcagatttgggcctggagaaccatactgtgaactgagtggaagataaatagagaggaaaatagcaaattaaggggacaaataaccagggggaagaggaggggggaaggttgcctgctggcatcaggagaggagaatatataaccagtgtctgatgcatttccttaagaatcagtgtgtttgcaaattgctccattgcatcttagcagaatctaatctgggtaacgaagagctgactagcgaacatagttggatgaattccccaagtactcctgaaatataacagagcaaggaacagtataatgaaaaataacagagagagtagctggaggcttaacttatgatcagtgttcattacaacaaatgacattttcactgcagagttaccgtaagattattgactcttaygtaatatggttcccatctgaacagattcgagaacagcttagcctgtgaatgggagagctgcagaggactgaagatatactcagtccccttattcatgttttcagttagtccttgggagctgcctgttcaggaccatggacagagcaaaaagagtttrcaccttcctccaggcagaatcttggtgattgtctttggcaatgactggcatggtcatgtgtaatattcagtgaaaaccaggctcagaaagtgactaaacttgttggtagtttcatatccaaggcctcctccttatgttctctgccatttgctattttcctcaagcatacatattgcaacatttaaaaaatatatatctctttggaaagaaacagtgttttgtctaaaacgttgggcacacaaccataaggcatattgcaactctatggcttcaaccacatttgaatggacaaccccagttctgagcgtagtgtggcattgccttggtttattgagcacctgtttgatacctgctgagcactctgtatttctgttattttgtcctcccaacaaccctattgagttatgtgctattattatcagtcctgttttatggaggataaagcacttttatcagagaggttaggtaacttgtctaagggtacccagctgccaagaatcacgaatgaatttcaaagtcatttctaccagtctgctgtacattataactttcacacaggtgctgaacataaagagagattcattcatattcattctctctcactctctctcgctctctggaaaagcagcctggatagtaagtctatccagaagccttgctttcacccagtattcatgagtcataccagcgttgcttgctgtgtattttaaaagttaactctatacaggtgtctcccatgagaaagggtttactgtcactattagctggaggtgcagatgtcagcccccagtacatgggagttagaagcagagcaagagaacacaaagaggccagtgggtgaggggctgtcttgttgcagggaaagaagcaaagtggtatttggaaacaaatcaacagttgtcaaaagaataatgaagacatctatgggaactcagtagtagcgtcttcggatctcaccttttctttagttttcagttgtgtatttctaaattttatgggaaaaaaattcctcaacaaagaatggggaagttaaaaaatacagttagccctattataaccaggggatttctaagcagtttattgccttgtttataaaagcctgattgggacgtccctcctcctggccactgcagcctattctggagacttccctgcagcccgtcttccctggcaatgggcccagaggctagacgtagtgtggccactcgagaaggatcacagctgagtgaggaagtctggtccaccctggaaacggcaaactcatgaatgcacccaagctgtagtcactgctgcttgagcccccagggagggcctcatggataatgcactctagccagccgggcgctggggacctttggctcttaaagctgcttttatgtttttgtgctttgggggaagagaaggactgaacatattttctccaaccaagtagcatttacgggcttcaggagttattcattttggcttaaaaacctttccaatatcacaactattacaaataaggacattgggaaaatctctaggtaaacgggactctagataacagatttcctgtgtgtatccttccttactcgaaaccagcagtttccagcctttttggcaccaggcaccagttttgtagaagacagtttttccatggaccagcagggttgcggggagatggttttgggatgtgtcaagcactttacattatagtgtgccttatttctattattattacattgtaatgtataatgaaataaatatacagtacaccataatacacaatcagtgggagccctgagcttattttcctgcaactagacagtcccatctgggggtgatgggaaatagtgacggatcatcaggcattagattctcataaggagcgtgcaacctagatctctcgcatgtgcaatggggagcagctgtaaataaaaatgaagctttgcttcctcgcctgccactcaccacctactatgcagcccagcttctaacaggctgcggttaggtacctgtccacggcccaagggttggccacccgttttctaaagtattaaaagtaaccaagtgccaggatgacaggaaaggggccgtcagcctttaaaatgtctttcatctaagtacaagaaggtggctcaactccaccatattcagcttgtctatatctgctgtgcagtagcatagccaccaactataggtggctcctgagctgttgaactgtagcttgtctgacggacagtgtgctctaactctaaaatactcaccagagttcaaagacatagtactcaaaaaatcattaaatttatgtaataaatttactaaattattcatcatcaaattacagataacatagatcatgaatcatttttaaattgatgacatgttgaaatgatattttggctatattgggttaaataaaatatgatattaaaattaattccatccagtcttttttacttttataatgcagctatgagaaaatttaaagctacattcatggctcaaattatattttggacagcgctattctgcagagatatgtggaatatggaatgtgtctctgcaaattggacgtactaatgtgtgtttaagaagattttagaaacagcttatgagaagagaacttaactcactcgaggtattcagtgagcaaatactaaataaaagagggcttgttttacctttttggggagatatgttggatggaaatcttcttggatgatcgtttttcagggaagaatacttttccatgagaatattgttggggtagtaggagacgattgttacagaacatggttggttgacatttgaaaataaccatggtgcacactttcctttggaatgttccatccagtgtcgtcgtacggggcccgggaggtgcttggctttgcagacacctgctcctctgccatctccaccccacgcttttacttccacctcgctttcaccagctgtatttagcatgctctagcaccttccaggggtgttttgtgggtgagattcttagatgaaacactttggattcttggatgctaggggctgttatgacaagcttcggctcttccctccccacccacagccacagttttgcttgcagcctacggggcctgttgggggcatgaagcagctaaggctctcccctagccagaggcagctcctaggtgaggcagtgccagggtcccactcaattccttgctgatgcatggaatcttctcatagatcatagacatctttatttttaagctttttgcacttgcagaccatacatttttctgagattcttaaaaatctgattttaggctgggcaccgtggctcacacctgtaatcccagaaggtctgaggaggaggaggtctcaggccaaggcaggaggatcatttgaggccaggagttctatattagcctgggcaatatagcaaggccctatctctacaaaatatttaaaaatcagccagacatgatgatgcacacctgtagtcccagcactttgggaggctgagacaggaggatctattgagtccaggagtttgaggctgcagtgagctatgatggcaccgcagccagggcaacagatcaagaccctgtccctaaactaggaggaaatggatgaaaattattaagtctgctgaatctacccagggctacaagtatttttttaaactttaaactcttcattctttttcaggattttttttttccaaaaaactcaaaaatgtgaaagtgaaaaaagaggagatggagttcaaagtctcatctcctgttgagctctcggagatgccgtctccattatcccattgccaggtgttcacttgctcctaaataccactttgctctttctgcacaccagcagaaatgagatgctgtgtttgtggatagtatttgccacttcaaagagaacacggcttacatggggaagtttgtctttgccagggaagtgggaaaaggtaccagatgcagcttctccgagctgcttctgcctaaagctcacctggtgagagccgcatggataatgcacatgtaggtagtaggtagctgggtattttctggcgttgattcctaaggatttttaaaatatcattactctacttgtttttgtttttaaacagacatggggtattgctatgtttcccaggctaatcttgaactcctaggctcaaaggatcctcctgcctcaggctccgaaagtgctgagattataggcatgggccaccacacctggtctgctccataagtggaacgtcattcaccttccagaaaatccatgggcgatggaggaggggaaaataatacagtgctgtctaaaatctcatgatactggccgggtgtggtggctcacgcctgtaatcccggcactttgggaggccaaggcgggtggatggcttgagtccaagagttcaagactagcgtgggaaacaaggcaaaactccatctctacaagaaatgcaaaaatgagccgggtgtggtggtatgtgcctgtaatcccagctacttgggaggcagaggttgcagtgagctgataatgttccaatgcactccagctgggtgacagagcaagactctgtctcaaaaaaactcacgataattatagattatcatgccataatctaaccagagcacagaaggaatcttagaggtacaagccctgtagagtttcacgtaacatgatttggttaaggggtaaatatgttaatattaaagtgatttgctctacagggttcctgggcaaagcatgttaagttccattcagatgcccaaccctgaccaggctgaatcctttgcctggagtgctttatctttgtgaggtctggcacattccaacagagcacctgctcagtgtgtgatatctgccgtggatatgagatggggagtagcagtgctcaggccagatagttaccacccctgtttagatccacacacctcctttttctgtttggggaaatgcaaatcaccctgctagtggattaatcccaaagccttctgaattccaattcaccattctctgccctgcactctgacacctataggcctgaacttagattaaacgtgatgtccagctttccactgacatggtgtattagtccattctcacactgctataaagacatacctgagactgcgtaatttatatagaagaggtttaactggctcatggttctgcaggaggtacaggaagcatggcggcttatgcttctggggaggtctcaggaaacttagaatcatggtggaaggcaaaggaggcaggcacacatggcagagccagaacgaaagagcacaagggcgtcaatgctgcatgcttttcaacaaccagatctcgcgagaactcactcactatcacgagaacagcaccaaggggatagtgctgaaccattcatgagaaaccgcccccatgatccaaccacctccaacactgaggactacaattctacatgagatttggtgggaacacagatccaaactatagcacacggccatgtgtcacctgctgtggtgaaatcatcaggtcacctgggcagagagaaactgagagggagggacagtgccaagagcagatggccaacagccacaaatagggagaggaggaggaatatcagtggtgatactaataccactatgtatggtatgcttctaccgtttgtccttatcgtaaaacaagagaaagcaaaggcttctctctagatactggcattccttttcatgggacaccagatctgtgtaatgtcactacctctagagccacaggacaatgtgtgctccacatggtttccttcacgtgatattgcttaaggcttcaatgacttagtatatacaacgtggcagagaagcttcctgtgtgcacactacaggaatcctgccctggtgatgaccagcctaatgactcagaggtcatgaacgaccctcatctgcccatgtaggagcctcgtgaggccagaaagactctaacccttccatgataataaaaattcattctgattttttttccaacaaagggaagaaaacactacttttatgttaattttagctgggcctggtgagttgtacctgtaatcccagctactcaggagtctgagatcacttgaggtcagaagtttgacactaacctgggcaatatagcaagatcccatctataaaaatagtttaaaatatatatataatgttaattttaaccaaattctcttataaattactatcttcaactagttcttatcaacattaaaaatcattaacattctataaaagtcctttgtatcttaaaggaatttagtagaatcaccctggtcacggtactgtacaaaagtgtccgcaagaggacaatggcctggctcccagaaggcctcacgaagtggcgctgcagcacctttactgagtgcctggtcttccctttagccttagaagccctgcaagctggcaaggtgtgcctgtaatcccagcaccttgggaggctgaggcaggaggatcacttgaagccaggtgtttatgaaaaaaaattaggcatggtggcatgtgcttgtgccagctactcaggaggctgaggcaggaggatcacttgagctcaagaggtggaggctacggtgagccatgatcgcaccactgcactccagcctgggcaacagagtgagaccctgtctcaaaaaggcaagaaaaatgaaaccctgcagccaactgaggaaaaaacataagaagttgttggaggaaccggagttccaccacagaggataactgcccccaaagacgggaacacttgcctcggtctgcacagcacagatcccttcagtagacagctccaggtgggaagctgatggtagtcacctgatgagcgtggaattgaggacatcaggaagtgatgcttggctcakatgttcagtcactccatatttttggggtgacagttgtgtatgaggcaccaggcactggagaaacaaaagtgatgttggcctagtccctgtctcagaggcactaatgatccagttgggatccatgtatttggatatttgtaatacttcctagtaagtacagctatacacactttcattaagtcaatcaacaaacatttctagtgtgtcccagggacactgaacaagacagataaggttctggtgctctaggaatgaaccttctatcaggggaggcaggaaacagacatcaaataaataactagatggtgacgagtggtatgatggaaatgaacgtagtcaaagatagaaagtgtgggcaaagatggcctggctcgggaactcacatttgcagtagaccagagtggtgacgtattcatcaagaccagcattgctttgattacaaggaacacaaggcctaagagggagggggattattttgatgattttacactaaacatcatccagcaatacagctgacttcaggcattgggacccacacaatgtccttaggcccagtctctctccgtccctcactcctgctttgtctgctggcttctcccccaagcaggctctctcgccacagtgctaggacaaggtaccagcagatctgggctcatccttcctacttcaagtaaaacagaaaagaaaggacttttcttcccacgcggtttgagctcccatgtgaggcctgtttttctcgctggctcttgttggccccgtgcttgtgtgtaaaccagttacggcacccagggtgacaggacaccctgatggacctaagactgagtcatgttgacactaacatcagggaagcacagccagaccccggagtctgaacacctgcagtcacatcacggtatttaaactctgggccttgtttccccacctgtcaaatgggaatgggggtagcgcctgtctcagggggaccttgagatgagcattccaggcagagtgaatagtgatgggaaacagaagcccctaaggagttgggatcaggggcatggagggtcgcggcagaaggtataggaggggagctggccagaagctggaccgtgcaggtgtggatcgcgtgtgccgggtgggcggtgctgtgttgttttctgtgattcctcctaggcacacagtcccgccagggcatccacagaactcacagccgctggtccctactgcctgcattttctcccccgttttcagtgctgactctgatgggcaggttctctctccagctttgctgatatccctggtctgcttatagtcgaggcgcactggtctgggagttaaggctggtgttattttgggtgacttttcatgtttctgcttcgatctattctgtgttgatttttattacttaacacccaggggaaaaccttatttccccatacgttcaagttttggggtggtgcctcactcttgccccgaccagagtcatccccagctagttctgtgttggcagggcataaaatctgaagcaggtcatgttaatatatgggccaaagtgatcattggtgactgtatcatatcatcctccagctagaggacattttaagaggtccattagatgattactatttaggttctgagagctagattcaagttagtgcattttcatagtagtggttttgaagagtaatttttaaatgggtaaattgcccatacaaaaataattcctaacttacttccttatatttatgaataggtttgtgtatcgttgtattacaagcacatacatatacagttggatgtctctttttagtctctgcagatgccaagtactaaaatgattctttcttttcataaataaaagaaatccactccaggtatgaagtctatcagggaagtaacttaccattgcccttggactgatttccttttgcctttgagtttattctggaaattgcaacatttagcactttgcagtttaatttaaaaggattacctattttcttaaatgcttaagcagggaagcaaggtgcagttattgatttttctctgcctgtattctgtgaaagctccttccccagggaacatacctcctgaactgcatgcctgctggtgacagcttggacctctgatacataaccaaagaccttacctaatatccttgcatctgctccgggaatttttattaagtaaaagcatcattagagtagacaggatgatgaagtttaatgagcatcttttttgcatgatattgttagttttgctctgccagaatcctcatttctcccctccagtggggcagatcgtgagtctagaatatatggctgttttgaaatctgccttatatattatagcctatttttcatatagcttgctatctgtcttaagccaactacacatttcgttgtggctgtttatatagatgccatttgtgcatgtatgtttatactttctttctccactatgttgggaacagaaagcaggttataatggagaagaatgtgacagacacacgctgccattcgtaaattgcatggaaccatctcttggaggtttgatctcaaaaagaaaaaaaaacatttccttttgaattaatgagacttctcacaggaattagggtaactgttaattttttttctttaggactcagcaatttacatgctcaggttctgtcaccagcccctgatagccgccggctaggagaaataaagctattacaagtgcttattaataatctcggcttcacactttgtccacagatctatttgcagagattttaaatttagcatcctaccggaagattacagattagaagcaaaattatttttctccattattttcactggccatatcctgagattttaaaattggttcttttcttggtctgtatgaggacttgccatggaaacacccaaaacaacagtagggatacatatgacacgagcaaacgacttcagaacagcatattgcacctctcatatacctggcattctgaaagacaatatttacatagcacacaatgtgtttctagcagtgcctggagtgtatagactacaaaagaagttaagcctgcactccctgccctgcagaaaatggtagacttcttaagaaaacaaaaccaagatgggagatgaggtaacttagtgctttcagagtttgaactttggagtcattgcctgggtttatcggagcctcaagctgctaagcctcaatttcctcatctgacaaataatgatcataataggagcttcctcgctgggttgttgcgacagtgaataatgaatgcacgttagctgcattggaaatgttgtgctgtgatcacggcactctgctgatgttttgaggtaacatgccaaggtcaggagtcactttatgtatcatcaaggacttagtgatgagatcctgatacatcccgtagggctttgtgatggcagaatggagaaggggaggaggaagctgtgaaagtcttcaaggcctcaaaatatggacagaggagatctcagttgcagaggggacctaagcaggcattcctggcagtaataacacagataagcaacaacaacaaaaacaagccaaaaggaatgttggctgtcaggaaaggcttatctcaggcctcagattgagtgagccattttttcatttttcaatgggtgagcccaaggcaacctgattaccagttcacctgccagggagataatgagcgaatactccccttttccagttccgatggcagaggttctggaaagatataggactctgaggctactcagctaataggtggcagaactcacactcactccatctttcctgcactctgccctgcctgcctcaagcccagccttaccttgcacacgcctgttagtgcagaaagagaggacattaggcgagccagattccccagccacatgcgctgtggctgctccatgccaggtgccaggctaggtaccccatccaggggccagaggttgctgtttttcatccatgcaccaggaagagttcagacatcctgtgtaggacacactgggaagggaagtcacctgcatcgggaaaaccaagaagggaaccattataatatttgaatggccatgtgacatgggcctgattaaagaagaaaaaaggagtggatgatggaaataaatgaggtaccataaaacagctaattaatgagttatgggccctttgaggagctgatgaaaactgtggtccctttctgccgaaatatacatatacaactttacttagagtttcagacacttctagggtcctaggctaagaacttctactgtagaggaaactaaattcctatcagacctgattaatatggtgaccaaaaacaaaaagaggagaatgtcaaaataacttagcatttgctcctgaagttctggagacatggagggacagacctgtggaaggtggggtgagggactcttccctgccttttggggattcatagccaaagtgtcccagtgggctgatgaggacttggagagcagctgctcggagacaatcattaaagttataaaattagatggaaagaagacacaaagacagacaggaccaaagaggtgtccagagagaaaacaagaaccaggatgacatcctagagccaagcgaggacatttttaagaatgaatggctccgcggggtggggtcttccttgctgctgcagcaaagggatatgagacccttggatctgacataagactcaatttttccaaaaataaagatgcccatattaaataaaatccacctatcagccaggcgctgtgggttacacctgtgatcccagcactttgggagtgtgaggtgagaggattgcttgaaccccagagtttgaaaccagcctagcaacatagtgagaccccatctctacaataagattttaaaataagctgggcatggtgatctgcacctgtagccccagctacttgggaggctgaggcaggaggatcgcttgagcacagcggtcaatgctgcagtgagctgtgatcatgccactgcattcctgggtgacagagcaagaccctgtctcaaaaaccacccccccctaaaaaaaaaaaaacacgtgtcagtaatagaaaatcatgcataatatatctgcttaatcaaaaaaaaagttgcaaaatttattctgagtacagtggactggaattttttgctgtgcaatcttagctgtccaggcggtagtggtcagttgcacggagcttgaagcggcctgtctgcaggctgttttaacagcacgtcaccgaagtcaccagcctgccaacccaggcagtctccaggatcatttccccatgatccttctagaagtgggcttcagcaggggttcctggggtggcagctcagggcagcgcccactcccacgttggcatttgggcttcacagtgagatcaagagcccttgtgagcctagcagactggttcactcatctcccaccactgagagcgtcgcaggcatctcatctttgaaaccatcttcagtgacagaagcctgttcatcagactctcaagagcaactgatcctcttgtgtcacttcagagtgcggtttctcgtttttttcccacttcttaatcatctcccaattctcctctccaaatcccggctatcaggggagagatgctctagggttccatgtcaaagggtttcctccagttcctgggctaagcattttacccaccagccactgcagccccatgggtgaccttgggccaggctccctttatcactctccagctgtcatagccgagtggcagtgcccgccgaagctttcccagaaagatctacaccaaaggcacaggctggcagtgcagattccgggcagcacgagggcatggcagcagcctgcaagaggtggaaggagttggccctggtagcctgcgtcagagaagcttcctaagaggttagaagcggcagctgtcattctgaaatgcctactgtgtgcccaagggacaagagcgtttccctaatttaatcttctcccaagctctccatggtagctgggaatcttcatcttcctcttgcatatggagacatcagactgtgggaggtgagggaggttccccagggcacacatcgttcagggctgagtagggtgtcgaaggcagaggtggctgtgagtcccagagactgttctccaggaatccctggtgcaggatgtggkgggctcctgtagggccagacaggtaccacatgagcagagagctgcagtggccctgagggcacatgctgtctaggaggggacagtggtgcccgggtttgagggatggttggcgtttcccaggtgaaggagatggagaagctttgttcaccaaggccctgggggaaaagtacaagttacaagaggtcaggacaraagttttttgccaatcctggcacttccccgcatggccctgcatggtatgccacactctttcctctcaggaactgcaaggaataggttgtctttcaatggcactgactgttctgtcctctgtagtcagtcactgctataaattcaatccaggtacatgcaaaacacaagccacgagtgttagcttcagaggatggtgggacagggaccagccagttcgtagtagcaaggggacagtttgcaaagctgtttgcacttcctctcgtagaaacaacacccatttttcctttgggacacaccttgcctctctgcgtcttggttctttcatttttccatctttttaatttatcccagaaactcattttccctattgaaattaagcagaatcctcacggacaggccaccctgtcaggcccagagaggctcacctactatgttagttctctattgctctaacacattaccaagaacttagtagttgaaaacaaaacgaatgtattacctgacagttctggaggtcagaagtctgaaaccagtgttgctaggttgcctcttgcaggagattctagggaagagcatttccttgcttttctggcttacacagaccacctgtgttccttggttcatagcccctttccccatcttcagagactgcagtgtaacatcttcaaatctctttcactttgaccccctgcctgtttttatttttgattgattgttaaggtcttgccctatggccaggctggaatgcagtggtgtgatcacggctcactgcagcctcaaactcccaggctcaagcgatcctcccaatgcagcctcccaagtaagtagctgggactacaggtgtgctccaccacacctggctaatttttttttttttactttactttttgtagagatagggtctccctgtatkgcccaggctggtcgtgaacgcctggcctcaagcaatcctcccgccttggcctcctgaagtgctgggattacagatgtgtacccctgcagctggtccctcctgctgctttcttataaggacccttttgatgacactgagcccacgggatcatccaggattctcttcccagctcaaggttcttaactaagtcatgcctgcagagtccccactgccatggaaaataacagtcacaggtttcagggatcagatgtggccatctttgggagctgtgattctgtctaccacacttacttgcccagttgaggccccgtggctcgtaactggcagagccaggaatggaacaccagactttggagcttgttgtgactgcaccgccactgccatagccacatccctgtgaaaacggccacttatggccgcttagtaaaacgccagctctcatctgcccacacagctggaggagttaaaggatcgtgcggcggacagcagcgtcatccagccctgccgatgactcactgaggaagtgggccatgcatttagctctgtcttagttgctttcttcaaaaaggattaaaacctttgttccagaggtgtttggggatttagtgttgatagaaaataccctgttattttgcaggggaaacagccctaaagaaggaaggtaatcatataattatcttgatttaatcactcttgactgtaactccatgtctgtcctacttttcaataagcattcgctgactgcttccagtaggtttgccatggtgctgggcttaccgaaacaccctgcaaggaagacaaacgacatctctagcttacagataaagaaactgaggcacggagagggaggcaaacattgctgatcatttgcccagagtcatcagctaataaacgtcaaaagcaggatttgagcagcaagttcagggccactggctcccacctggccctttgtagtgacttgttctgcagccccaggatgttcagacacacacagtgggatctgaatataaaaaggcagagactgaaacagtggaacattccagttcgctccgaaaaaggagaagagccctgcagcttttgcaaccccttctgaaatcgcttgcctggatccccatcgtcagggccaagctgaacacccacctcagcccttcccgcattcaacacttgactcgaagcagggccttgtcaattcctctcaattcctactgctcctctccctctgctgacctcttatcattgccaagactctttccttacactcgggtattgctaggtttccatgggcatgaacagtggagtcatctttctgtcaacttttagaatccttacagtttggaggccaggtgcgtggctcacgcctgtaatcccagcctttccaaggtgggtggatcgtttgaggtcaggagtttgagaccagcatgtccaacgtggcgaaaccccctctctactaaaaatacaaaaattaggcaggcatggtggtacacacttgtaattccagctacttgggagactgaggcacgagaatcacttgaactcgggaggcagaagctgcagtgaactgagatactgccactgcactccagcctgggtgacagagcaagactccatctgaaaaaataataataataatccttaaagtttgaaactatctttgaataaaaatgtacatacgtatttttttgctctgtgcggataaggggtttgggaaacagaggaaagatctctgaggctggaaggaagctgtgtgtgtagctgaagctacctaggccgtaggtgcctgtgtgaagacacagagtcagacccttgcttcctgccaggtgaggggagcttggagacctgatgcctccagggtttattactctgcagtgctaagcccttgagcattgagtcagtggccctgagtagatcaacatctgaggacaagggcaggtgctgttagaggagtacgcatgtttcggagcttggaggatgaggaatagaatggagggatctactttgagcatttcctctgcctatctgttgtgtctgggagagatgccgaggaggaggaacacgggttgagtccacatggctaatgcagggtggtccttaacttcgacacctgcagagccccttttgtcatgtaaggtaacatactcccaggtttcaggacttgaacacaggtatctttggaaattgggggcagcaacagagacaaggttggacccgctgaactttactccctatctaaaccagtggtctcccacctgggacacaggacccaggacccccaggtgcccatggcctcgtcttcagggggacccgtgacccttttaaaagtgtaggttgggggagcccctataggttgaaaaatgcgctttcatggagcagatttttttttttctgagacagagtctcactctgttgccaggctggagtgcagtggtgtgatcttagctcactgcaccctctgcctcccaggttcaagtaattctgctgcctcagcctcctgagtagctgggactacaggcatgcaccactatgcgcagctaattttttcttttttttagtagagatggggtttcaccatgttggccaggatggtctccatctcttgacctcgtgatctgcctgccttaccctcccgaagttcagattctcttaaggagttgtttcttcttctgtggcttcagaggaggcacagccgggctggtcaggacagggctactgtctccattacacaagcaaaaaggcctccaaactaattcctagagatgtggaaagccaatttgcaggctcttatgttctctgtctaggacatatggaaacttcttgatgcaaaagaatggcctccccttttcctggagtgcaatcccagcacctggctggatgtgcacgctccggctcgtaggtctgtctctggccagctctgaaccctgtgttctacactccgtgagagtgaccgccgatggaacctgcttgtaccgcctccaaggcaacacttggaagactggaatagttagaatacagtatggcctttcaaaaccatagtgtccagctttcctggatcacaaaatcaactgggcagttccatctgccagcccttcccctctgcctgtcagccatggtggagatgtcatcaagaacactagtattggacgccaggcacagtggctcatccctgtaatcccactttgggaggccaaggcaggaggattgcttggggccaggagtgtaacaccagcctgggcaacctagtgagaccccatgtctattaaaataatttttttgttggggcatggtggctcacgcctgaatctcagcactttgggaggccaaggtgggtggatcactggaagtcaagagttcaagaccagcctggccaacatggtgaaaccccattgctactaaaaatatgaaattagctgggcatggtggtgcatgcctgtaagcccagttactcaggaggctgaggcaggagaattgcttgaacctgggaggcagaggttgcagtgagccaagatcacaccactgcactccagcctgggcaacacaataggactccatctcaaaaaaaaaaaaatatatatatatatgatatataatagataatatagtatattttatatgatatatatgatatattatctatatgtatcatatattatctatgatacatataatatacagataatatatgatatagataatatatgatatatatcatatatatcatattatctatcatatatatcatataatagatattatatatgatatatatattttttttaattagctaggcatggtggcatatatctgtagtccagctactcaggaggctgagccatgagatcgcttgagcccaggagtttgaggctgcagtgagctatgatcatacactgccctccagcctggggagcagagtgacagagtgagacactcaggaaaaaaaaaaaaatgccggacgccagtatatgctaaacagcccaagatgccagcatccagagagtgtgcatattccttgtgtggatgctggagctgggccacctggtacagggacgtcaggctctgtgccaaccctcattcacagcaactgcgggctgtggagccgggtatgcccttgctgcagaggacctgagacacccaccaggctctcttggagacacagttatatcaataaaaggagttaagtttgagctgtatttattttagggtggcttttaatttggtttaatcagaattactcataaattatcgattaattaccttctgctgttcagttaaatcctctcagccacggagccagcttcgctgcgcaatgaatgccatccaccgtaattatagggcactttgtcagcatttaatcagcggtacttattaatgtggcattgatgtgtggtggccagccccacgctatccatcatgggtgagcagccagcacagatttggacaccattgctctctgtcccattagccagcccctgggctttcgggccaagcatcatgctcgcttttcactaaatggacactctgtctcttccattcaatcccatttttatcactgtcgacttaaacactcataagcttttgaacttcagtccagaacggctgagcagggcctgaccacttctcccagtgagtgtgaaatcccaagagactggtccgtgatcggacatcatggcatggcgtgcatgtgtaagagaattttatattcaacacagcgtagcacccagagaacacagaagtgatcttttggttttctttggcttactgaatatttttggagattcttctattcctgaaagctcttccagtgaaagctatcttgtgttggcaaaatagatctgatagtgtcctttctctgtctttgcagcctctacggcagacacatgcaggccaacccagaaccaccgaagaagaataatgacaaatcgaaaaagatcagccggaaacccctggcagccaagaacagataaggaagggattggcatcggctggccttccagcaccttctctctccaacacttcattctctcttgccctgtctctcaaataaacccaatgctgcgtgtgaggccttttttatttttcttttcactctctttctaatgcttcccaccttaccttttagattcttttgctaggkgggagattgttataaggtctttaaaccatttccatttgtttctttaacattaccaaaagcagggaacaaagctcttattcaactgcgaattccatagtgggctctggcttttcttgaatagayatcacaaggttgcttattatcaaaagaataattaaaatcatgtaaccatttaaatgtcactgttaacacttttcactctttctgttgattcacctaactcattattttgctttattaaaagtcttccttcaccaccgagatatgctaatttaacttacaaatgattttaataaaatcttgagtttgtatcacatgttacttattgactcagaataaaagaacagtctgatcttggggtataacacattttcatttacttttctcccccaaaatcatcttatccaattttattggttatacatgataaacttttcatgaaagaaatgcaaaattaaatcacagttcgtttcttctcacattaatttgtcaagttttttttttctttgaagactttctaaattaggaagcagaaaaacaaatctctaggagattctgccaaaggattttggaaagtagcattccttcgccgaagaaatggtgatttctgccaggggctggtagacaagaactgtgaaagagagagagaaaaaacctcaactgtgtattttgtcacggcggaaaatctgctcgcatcgaagcattcttctaagcgacttcgatgccaaggaagttgtgtaaatgtgcacgcgctacaccacacccagggtggaaaccacagttgcagagtcattaaacaatcaattgtttgtttaacatctgtgataggcagctttccttcttttcaacagtgatacctacgaaaatcaaaataaatgcaagctgaggttttgtgctcactgaaagggctgtcaaccccagaaggccgacacaaaaaaaatggtatgtgaagatgcaccgtcttttcaaatggcctgggagagtcaaatggcctgggagagggggcctgcccttctctgctgtgtcctttcggcttcccagttgagctcccaagaccaggacccactggggcatataaaatctctgctgtatcctttcggcttcccagttgagctcccaagaccaggacccactggggcatataaaaaagtcaaaaatcaaaatcaaacaacaagttctgagttacttaggaaacagacttcgcatttcaatcagagaggccacagagcaaggtctaaacttctggcttctagacaaattcctgatagaacatttaaatgtgggaagtggcttccccaggtcccatcccctgtttagggatagagttgatatcatttttataggtgccatgtatgcctctgcctgaatttttttaattgacttttgagcttttgagattgcacgagggagaacaaggcctttgctgttgtggataggaaagacttaacctaaaattaaaccagcaagaaagcattagtaaaaatctaacaatatgaagggctcttatgagtcatttttttcaaaagatgaaaactccagaaacgcacaggaacgaaatacctcccagaaacatgaagcaatcatcgaagactcactggtaatatttttaaaaagtatacagatcaaagcaaaaagaagccatgtgtaacaaagagaaatgtgcaaatattttttaaggcagtattaagtgcaagaggagtaacatgaaataaacattctttcacatggctactgggaatataaatttcgctccagaaaggccgtagcagtttgacgataggtggcaaaaccttaagattgtgtactggggcccagaatttttatttctaggaatgtatcctgaggaaattatccgagatccccacaaactgcaatgtttaggaattgtccttatagcattgcatacacaagaaaaacagagaaaagcctgatccctgtcagtggaaaaggggttcaatgaattacggtgtgtctgcatgaggcttttatgacattaaaaattgttgaacaacggccaggcacagtggctcatgcctgtaatcctaacactttgggaggccaaggtgggaagattgcctgagctcaggagtttgagaccagcctgggcaacacggtgaaaccccgtctctactaaaatacaaaaaattagccgggcgtcgcagcatgcgcctgtagtcccagctgctcaggaggctgaggcaggagaattgattgaacccgggaggcagaggttgcactgagctgagattaagccaccgcactccagcctgggcgacagagcaagattccgttcccaagaaaaaaaaattgttcaacaataagggcaaagggagagaatcataacatctgattaaacagaaaaagcaagatttttaaaactaactatataaggatggtcccagctgtgtcaaaaggaagcttgtttgtaatacgtgtgcataaaaattaaatagaggtgaacacaattattttaaggcagttaaattatctctgtattgtgaactaagactttctagaattttacttattcattctgtacttaaattttttctaatgaacacatatacttttgtaatcagaaaatattaaatgcatgtatttttcaaaatcaaattggtatgtcatggtatattatgcaatccaggaaatatatatttaagctcaaggcataatataaaatgtcaggagggttttttctctttttgttaccaaaatggatttcacgtcttttcctacagtttttagttacttgatatctggatcagcaaacaaaatatccaaagtttgaaaggtggccttttttttttttgagacggagtctctctctgtcacctaggctgaaatgcaatagcgtgatctcagcctactgccacctccgcctcccgggttcaagcgattctcctgtctcagcctcccgagtagctgggattccggcacccgccaccacgcccaattaatttttgtatttttagtagagacggggtttcaccatgttggccaggctggtctcgaactcctggcctcaggtgatccatctgcccgcctcgtcctccaaaagtgctgaaattacaggcatgagccactgcgcccggctgaaaggtggccttttcacaaagataacctaacctttttagcccaatgatgaaattagctggcccccccaccccgcctttgatgccttgcagtctggtcttccaagtgctaagagcccacatgggaagccgtgcatatttttttattcctcattcgaaacttcttccacagggtttctcccctttatgtaaaacactgtccttgcccacgtggctaggtagcttagagatgttatgcaaaatactttcatacacataatcacatggtttgtgcaagagccttgtgggataggtaaggcaggttatttgagaataaactgtataatggttctcagatctaggagagaagtgtttctctttatttgctggaggtgatataatgtttattaggagccttttttttttttttttcaattaaggtaggagcaagtagaaaaagtggatgggccatttggccacagaaccacttctctaagctttgtaccgcccttataatctgtggaagccacgttaggaaatactctgtgggacaaagcgacaggcccccagtcacatcaggttcaccctttggaatagaagtgacttgtacaccactctgcagaagtgaatcttcactttgataaacttaaatgtagaagagaaaatcctgtgactgcagagaactgggttgtcccaatcattgtgtccatattcactgaaaacacaagttgccccgtccatgttttttatcctgtacttttacctccttctacagactctgcacacaacacttgtttgttgcctcagattgcaaagttaagtcactaatagttcagtttctaataaagcttcgtagtcataatatcccacaagtactatgttagaaaatcctctagtctctacctgcaaaacataacatgaactgaagactttgcaccatcttcttccacactggcccaggtcaccctgccttcttgcctgctccactctggtatcctctggtggggctcctgcttttgctcttgcactgagatctccatgcaacagagcaaatttttatgtgctgacatcacatcaggacgctcttctgcccactgtcttccagtgaagtccccttgtgtctttcactcagagtgaaagcctaggttaccagggtctagggtccccctactcctccaggttcttcccccttcaagacttttgtgcaggtgatccttttctagaatgttctgccaaatgtatacctgtaactccttcatctacttcaaatcctggttaaacagtcactttctcaacagagcctcccctgattaccctgctttaaatttgcaatttattttgtccgtcacctgccttccacccccagcgaagtagaggttcctccaggaaaagggtcagccagctacagctcagaggcacccagaagccaaacctggcccacgcctgtttttgtaaataaagttgtgggaacacagccattctcattcacttaaggtctgtggctgcttttttctttcctttttttcttttttaattttggaaagggagtctccctctcttgctcaggctagaatgcagtgacacaatctcagctcactgcaacctccacctccaggattcaagtggttctcatgcctcagccttccaactagctgggattacaggtgtgcaccatcagaccgaactaattttttttttttttttttttttttttttttgagacggagtcttgctctgtctcccaggctggagtgcagtttggctcactgcaagctccgcctcccgggttcacgccattctcctgcctcagcctcccgagtagctaggactacaggcacccgccaccatgcctagctaattttttgtatttttagtagagacggggtttcaccatgttagccaggatggtctccatctcctgacctcgtgatccgcccacctctgcctcccaaagtgctaggattacaggcttgagccactgcgcccagcctaatttttatatttttaatagagacagggttttgtcatgttagccaggcttgtctcgaactcctggcctcaactgatccatctgcctcagcctcccaaagtgcggggattacaggcatgagccaccatgcccagccagtctgtggctatttttatgtgaccacaacagagctgactggctgacacagagaccttatggctcacaaagcaaaaggtttctactatctggccctttgcagagaaacttctgctgattattctatcaactgttacatccccagcacccagaatggtgccttgtatacaataggggctcaataattatttaattgaatagactacaaattggatacttgtgatttggatgatataaagctaatattaaggtagagggaagggaaaaagtcctagacatcccttttatacctcatcattctgggctactttatcaaagctgaattctcctaagggaaaaaaaatgtatggatattattacaggtgagaatttatgcaaccctgttaagagttcaaacctttacctggatgtttggttttccttataattacacaattgtttcatacttgaccatttagccttcctcaaacaaccatcaatttcttcagtaacaaaaccagaaagggctggcaccccaatttacctgtatgaacccagaagaagggttcatgtcaaagccaaaatccaaactggccttgtcaatgtgagtcaattcagatgtttagaagcagcagaattggcaagtaaagtgaaaagtctctgttctctggacattttgtgacctaaaattagacattaatcattcctgtgtgtatctctccatttatagtatcatgtgatcctaccatatatggtgtgtccttatttttataattgatcttcccatcaacaacagctttgggagactcctgggctctaacatcatgtttctgttaagactgcataaacattttgtgtattacctctttcttaccatatgcttattttgtacacaatagaatttggtgattggccactgttaaatttccctcttaatctattttcttttactaataatagcactcattgattgcagcctgttcatgtatcaggcactttgtttcctttcattctcactcaatggatatcctcatcttgtgggaaatttgacctcagagaaattaaggaacttcccgcaagagcccacagctggcaagtggcagaggaaggatggaaaagaacatgcatttgactgtagagctaatgtcctttccttaatcccacatcacactctgctgtcaatcaagactcccttggcctatccaaaaggcagcaattttccttccgatgaaggaagtttctgcttttgagctccttaagtgttcattttattaacacattcaagttactgcatgatgacagctttaccccatttctataaatgacagaaacctttggtttctgctgtctctgttcctcatgcttggtcaggcgacagcatctctctgatggttcagtgatggattgaccaaagcggataagcctcacttctgagaataactttgccctttccccgtctcatccagaaattcacttccaacactgtcctatcagtgaactattttactccaaaggggattccctcatatgacccacccaaagagcagcgcttcctgaaatagatagagagtggctttgggtttcgttttgaggcaggtttgggctagcatcatcagaccacctggagactttgttttttagtcattcaatcagagactgagggctgggtgaggtggctcacatctgtaatcctagcactttgggagaccacggtgggaggatcgcttgaactcaggagttagagaccagcgtgcaacataatgaaacgctgtccctacaaaaaaaattttttagccagatgtggtggcacaggcctgtggtcccagctactcgggaagctgaggtgggagaatcacctgagcctggagatgagaattgcagtgagctgtgaacttgccaccgcactccagcctgggtgacatggtgagactctatcaaggaaaggaaaaaggaaaggagaaaggaaaggaaaagaaaggaaaaaggtaaagaaaaaggaaaaggaaaaggaaaaccagagaggagagaccgcatctcatccatcctggtctcacagctagtgagtacctgaaaccttggacattcaaacattattgcatgcatgttccgtttccactggaaatttctaatgccctactgacatttttccctaagcatttatactccctctataaatggagagaccatgtcctgtgatgggatataggagtcagccaatatctctatgttttcagacccaggaattgggagtgaattaagcaatcagggttggatacaaatatagcattatcagaaaagacttgtaattagaattgctcatctccagttacttatggtttgtgtcagaccctccttagaatcaacaagacttcagttacatagctgacatacacacagctccctggggtcaagaattgtgctgtcccccaacgtccaccccaggaagcctcccagtgtctgcattcaaaggaccaactttatctgtctctggagacacagtcttctgtatacatctactgcccagcacattctgatgctgccatttccagtgtacagatgttgtcagcaaaactgactccttcctgccctaggaagaaagcgcttccactcactaatagctgaaagcagggaaagaagcacagtccattcataactcccccagagcgccacccaaaatagccctgccacaccaggtggacaatctcactgtttgtgtgggctgctgtatttgtcattgtgcaatcaggattttaacaaagagccactttttaactcgccgtgcacaatgcagctgtgaaaccagtattttcattaaggaaggctgggtctgagatgcagatcatcaaaccatttagcagctccagtgtgacgtggagctttgctgttgccggttaggatcagtaactggaaggatttgaatgaaaggccataaagacatgaggccaggcacaatggctcatgcctgtaattccagcactttggaggccaaggtgggaggatctcttgaggccaggagtttgagaccagtcttggtaacatagggagacactgtctctacaaaaaaattctttttttttttttttttttttttttttgagacacagtcttggtctgtcacgaaggctggggtgcagtggggcgatctctgctcactacaacctctgcctcccaggttcaaatgattctcttgcctcagcctcccaagcagttgggattacaggcatgcgccaccacacccagctaatttttttgtatctttagtagagacggggtttggccatgttggccaggctggtcttgaacctctgacctcaggtgaaccatgcaccttggccccccccaaggtactgggattacaggcgtgagccgccaccatgccaggtctaaaataaacatcctaaaaattagccaggcatgatggcaagc

SEQ ID NO: 6802 - DNA, 191597 bp, Homo sapiens
tggacatgtattcttaatggcttcattctttcttaacaagaagactgaagatgattactggccagtaaaataaacacctactgttcaagctactgttggttgaattttctgttatttgtatccatattcctaagtgatgcaaatatgctaaaataaaaaatgatagtctctgtgtaaaccattcccaagacgtagccactgttaaacagttaacattgggtatatattttttcaagaattttatgcatatatgaatacatataaataatcacaaatacatataaaattgatgggctcatataataaatgcattctgttctagaacctcttttttacttaacaaaataccatgatatatttctatgtcagtacagcttttttaaatgactcaatctattgctagacatttaggctatgtccaatattttctcattataagcaatgctgaaataattatccttgaacatacatctgtgtgcacttgtctgattgtttattgtggataaattattagacatggacaaagggtacacacatattaaatgttgacacatctatctagaaaatgtttattgaggggctagtatgtgtggcacacttatgcttagtgaacagaacagatatgtctcctgtctgggtggagctatttgtatgctgggaagactgacagttgaacaggttaacaaatagtggatggttccaaattgtgatgagtgatacgtaggaaatgaactagtggggtatggaaataaaagggacctacttagatagatgacccatgaaggcctccaagagggtgacatttgagctgagagctcaaggatgagaagagcccagaccctataagactgaaaagagtgctgtaggcagagtcacccagggaagaaagagctttgatgtttaaggatctacaaggaagccagttggttagaatggctgagaggaggatggaggggaagctgggtccatatagcatgggaccttgaaggctgtgctggagcatttaaatcttattttattttatggaaagtccctggagggctttaagcaagggagcacctgctgcatttttattatttatttattttgttttatttattatttatttatttattgagatagggtctcactctattgcctaagctggagtacagtggcatgatcacagatcactgcagcatcaacctcccaggcccaagcaatcctcctacctcagctgcccgagtagctggaactacaggtgtgccacaccatacaaagctaatttttgttatttttcatagagatggagtttcatcatgctgcccaggctggtctcaaactcctaggctcaagcgatcctcctatcttggcctcccaaaatgcaaggattacaggtgtgagccactgcacccagcacttattattatttttttattttaaaaaagtatttatttatttttttagagacagggtctctctgccatccaggctggaatgcagtggtacaatcatagctcactatagcctcaaattcctgggctcaagtgatcctcctgcctcagcttcccaagtaactaggactacaggttcacaccaccatgtctggctaatttattattttttgtggagatggagtctcactatgtttattgatcttgaactcctggcctcaagcgatcttcctgcttcagcattctccaaatgctgggattataggcatgagccgccatacctggcctattattatttgttaatgattgctctggttgctactttccattgtttgggtagggcaaagccaggagaccagtaaggaaattactacagtggtctaggccagaaaatatggtttggagtagggtgtatgaaatatacaaatttgtatgccttatttgtatacctatatacaaatagctcaatagattaaaatggatattcctattatatacaatagatgtataatatacaatggatatacctatttttataggaatagttatttaaaaatatacgcattctcagcaaactaacacaggaacagaaaaccaagcaccacatgttctcactcataagtgggagttgaacaatgagaacacatggacacagggaggggaacatcacacactggggcctgttggggtgtgggaggtaaggggagggagagcattaggataaatgactaacgcaagcggagcttaaagcctagaggacgggttgatgtgtgccatgaaccaccatggcacatgtatacctgtgtagcaagccttcatgttatgcacatgtatcccagaacttaaagtaaaaaaaaaactatatctacatctatatctatatctatacacacaaatagatcaatggataaaaacaaagcatttataaacagaacttaatatatgacaaaagtgtatattcttacactagtggcccatagtttcttctgaagttttacattatattgtaatatttgttagagcaatattttctcattattcttccatttcaaaaatttcatgggtatttcctcatacttatttatcaagataagtttcttgttagtttttttttgttgttgtttgtttgtttgtttctgagataagatcttgctctgttgcctaggctggagtgcagtggcgtgattatagcctactgtagcctcaaattcctgggttccagcaatcctcccaccgcagcctcccaagtagctgggaccacaggcacacaccaccatacctggctcatttaaaaaatctttttagagacagggtctcactatgttgcccagtctagtcgcaaactcctggccccaaacaatcctcccaccttggcctcccaaagtactgggattaccagcatgagccaacacactcacgccaatcaaggtaaattttaaaataatttcatcatgttccatctcacctcacccctcagatcatagtggtttcttgatctgaattttactaaatttataaagtgagttggggagacacagcatctttgcactgttgagacttcctgcccagggatttgttatatttttccgactattaagatcttcttttatgtccctcagtcaggtttgtagttttctttccatggaccttcacatttcttgttaagcttatgcctagtatatgccttatagtattcattgctaatgtgaatatgctttttttccatcatacttcctaaatggaaataactggtatttagtgttgtatttggaggtctctgtaagtaatacctccctccctattctaagtttggaacaaactggggcatagacacaggaaagagacataagacaaaaatactaccttaatttttaatgaagctgactggaaaaagtagcttttgctctgtagctaagtgggcttgctatatttctccctgaattgagtagatttatttgtgtagtggcgggtggtgcaggagaatagtatcactctgtccctgaaacaggttcacttaacccacagtgagagcgcatggaaatatttgctctctgcagtcagccaaatccaaaaagagaactcagaagcatctattcttgtccactttttccaaactcactcatcttcccttagagtggagagaggccagaagtcttattctaatggaagtccctctatatggaaaagaaggcttctcccttcaataccataagacagggtaaggaagaaaaaaaagaataataataataataataagaagaagaagaagaagaagaagaagaagaagaaggaaggagaaggcttctcccttaacatttaggaaaaccattgattttggtgtttatcttataactgaccaccttaccaaagtctctatgatttttagttgattttttttatttttactttttgggaaacacttaaatcataagcaaataatgacaattttatctcttcccttctaatatttatatttcttatttatttttcttatcttattgcattggctttattctatagccattatagcaggcatccttttgactgacttamatgagaatacctttagtgtttcaccattaaatatgtttgttgatggcttctgataaactttgtcatgttaaaagtttaaactttcttcctataatagtttactaagagtttttagaaatttatgggtcattagttttgaagtttataaaatacttttaaagcatctatcccattgataatatcctgtaatttgttttcctttaacaatgcaatgcatttacaaattccctaatgttggatttttcttgcgcctctggaataaatcttgcttgatcatggtgggttttcagttgctttaatagtaaactggattcaaatggctaaaattgtatttaatagttttacgactattatatacttaaatatatagtgcagattcacatattgaagatttatcagtgagctttagaaggtggtcctggctcagatgagtttgggaaatgccaggttaaacaaaccaaacaggtttctttactcctggacttcacagaggccttccttaatatacgaatacttatcgtgattctccaaaaggtacactataaacggcatgcagcactttctcaagttgcccacagaagcccattttcaaaaaataaatattaaattctctggggactcgtgttctaggttagtcatctgcagttctttttggtattgtctgttggattttggtatcagggttatgctaaacttgggaaatgaaataaaaatttttgtttcttttgtttattttttcctgtgtaacagtttaagtaacatagggatgatctgtgccctgatgggaggataaggcttgctgtaaagccatctgaacccatggcatttctgagtagtgaagacactgggaatgcacacgtgcatggcttccctacaggatgtttcccccgacagcccattctgcttggcacccttctctttaggatcaaacagctattatggaaaagcctagaatgtgtgaaaatgagactcaatgcattagcaaatcaatgctgatcactcctgcatggtcctcaagtcctaacgaatgctccagcctcctggcaggaaacctttcaaatcttgcacacgctggcctctgcctgggatgcctggctgggcggtgtggggggcatggttggttaaggcgcagagtccgcctttcctaccagccactctagctgagggtcaagctctggaccctcccccaaccatccagctccattttatccttggcttatgccttccccaagtactgcagggtaggactcctgctaaaaacttcttctagatgcttgcctgaggctggccccataaacctgattctaggcttctggggataaatcatctaactaatataagagaattgctaggcaattggggttagtttgagacgactggctgagctcaccttaggtgagctggggggtgggggaagatgagctgaaggattctagggttcagtgaagcctagaatggctgggtgggcggagagtccttagaagggtccaacttctagcctgagggcctgggggcttccagggatctgcagccgagcggaagaccggtcttgcgtacagcgaggcctacgagagctaagtgggctgagggtccctggaaaagaccagcctgggggcggggaccatcgatgccccaggctctagaggccgtgggctcccgggggcctgaggctggactggggtcgccggcgggctcggggaggcccgggtgggcgcaccggggccctgcctgcggctgacgggctgggtcgagggggaggctggggaggcggggtgccggccggggcggcggcgcgggctcgggacgccagggctccctctccctcctcccgcccgagccagcctcgggcgccgggcgcctcccccgatcctgaaccagcgccagcgccgggaggcccggagcccggcccgccgccgcggcccgcggagggagccgccgccgccactgccgttgtcgccgccgccgccaggccgcgccccgcccctccgccgccgccgccgccgccgccgctctcggtgaggctcgcgctcgagctgcggcgccggctcctgccgcctgggccccgggcccggcccctcccgcgccgcccgggcgatgagaagctgcttctgcgtgagacggagccgggacccgccgccgccgcagccaccgccgccgccgccccagcggggaacagttaagtgaggcccgggcgccgcggaggctcggcggagccggccctgcagccgggagggcgggcgggcgggcgcgggcccccggccgaggggcgggcggacgggaggagccgggccgcgccgaggcctgcgggctccgtgcccggcccgcggcggggacaggcccgggcggcctttgcagagccccgagcgcgccgcggctgccggtgcccgggctcggcctggcggcgagaggcgggagaagctgggggacccgagtgccagcagcgcccccaaggcccgggcaggtgaggggcgccgagagccacctctgcccgcgtgagagggaggcggcccacctgggcacagactgggaacagtcaatcgtttgaccggcctggcctggggtcctgctctctctggtcacgtgggtgcagaccaacgtgcacctgccccaggrgcatcactgcctctgtgacctgggcacagcagagaggacacctaaaccctcaggcacctgtctgsaaggtgacatgcccagcctgggtacccgagacccagagcacccatccaggaacatggtgggcacgtcgagcaccctacagtgactccaacaccagcgagacgggaggagcaggggctgggacaagagctgaggcatggcaccaggggacatcacatcctcagaggcaggcaccagggaacggggtagacccargagcatcttttgtcctctttgttaccaacacacaactgttctaaatcagcagcccttctcaccatgaaagatgagactcttctgttccctgcccctcaacacctcttgcacaaggcactgaggaagaccacaggagggcaaaaggcaaatggtggttgccccttccctgcttcctgcccccacccaagaaccagagcccactccgattgctgccacaaaagcagacagcagaccagctcctcttaggggcctttgtctctcgtggttccttctcagtataatctcattgtacatttctcgacagctggctggatctcatctcgttttaacagggctgggaaatcttatcagcggcaccaggaaagcttagagagttaaaaaataagctctgtgaagccttgactaactgaaaaactcaatgtgctaggatgtttagttacagtagatggtgacacctttcttgcttgttagaaatcatgtggggtccttggagatactgtaccatgctcagaatctttaaatagggcctcagagagatgaggcttctgcttgggacccgggctccaagccccatgggaagcagttgacgtggcgattactggttcatttaaacctaaacttaccytctgtaatccatatttttcattccttccttctaggctttaggtcacactcctaatttaggttcaaggcatttttcttgccctgtctccatcctgctagggaccttttaccacttccaactggaatgttgtgccatggttatgtgcagggagtttagaattagccctcagcttaagtcttggctttcctacttactttgtgcccttggacaaattattgaacttttctgagtttcagtttcctcatctgtagagtgaaactaatgatagtattcatctcatgggattatggcgtgatgtaaatgaaattttgcaagaaaagtctagctcagtgcctgctacatggcaagaagtcagtaaacggtaggggtcattatgagaggtttgttaacggatgaatgagaggagtagcttatttatttatttttagagtttctttctgtctgctttttttttggtttttgtttgtttttgagacagggtctcactgtcactcaggctggagtgcagtggtaccatcatggctcactgcagccttgaactcctggactcaagcgattctcccacctcagcctcccaagtataggtgcctgccaccacgctcggctgtttttttaaattattattatttttagtagagttggggtcttgctatgttgcccaagctggtcttgaacaccagagcttaagtaatcctcccaccttggcctcccaaattcctgggattacaggcatgagccaccacgcctggcctattatttagtcttcaacgggacaaccaggaagtgatggtatagtagaaagaacactggacttggatttaggagcttgagtttgactctcaggctacctcctggaccccaggtgaccctaggggagtcacagaacctttctgaatccccatttctgtaatgtaaaagtgtcttaagaacaaagcctaccccataaagctaatcagtcaagaagagctgaaggagctaatgtatgtgactgcacttggcactgcaggaggtggcggtcctcatgaaatttaagtgtgcgattcagcatccagcagcagatcatggtgtttttttcaggtccgatgtttatacagtttgttgcggggagagcattaagaaaaagaatacaagaatatcctgtgtttgtacatgttacagaaccacgccaccatgtgagcacactgctggatgccctctcagggccttggaaggggtaagggagaagtgtagtctctatccatttcatggaggatcttctcctggggggatcagaatccaaatggcataggcccctctgtctgagtttgctggaagtgctccatactcaaagggagacatccttgccacactgcaaaataatgatggtgctggagtcaagcatgggaaaagtcgaaggtgctattatgatgatgaagataacaaatgactacatggctggatgtggttaggctgagcacactgtgttgcagagcctcctttgcaggttgggttgtggaggggaggcctgggtttcttgaatagactccttctccccaggctgctctggctctcaccgaggcccaccctggccagcatttccccaacccaccccgcccccaaccccggctctccttggccttctgcttgctgggctgccctagggaatcgtggcttccctgcgctgtctgcactagttgcagtgggtttgccagagtcaggtctcctgtctccggctgcctgggaggcaaagccactgcagagtgtgcttgacattacctcccttgttggggacatcctgtgggcatgcatttggtttacttgacacgcttctggcgagatgcagagcttgtccaggcagaaatgtgagagccctgtgggcctggagcccaggggttgcacatagtagctttgtggctcatacttcccttaggactggagggccatcttgttggacctgtggcaggagtcaacaygagtttgttctttctttctttacacacacacacacacacacacatmcacacacacttaaaaaaaacagattctaatcagcagagcagaatattcaaaagaatatcccctgatcctttagaagagagaaataaatgagtttgtaatgcactaaatatgcctgtggtgttgatgaaaatgcagattctaggacctcatactcagactttattgagtcagaatctctggggaacgggacctggaatctgcagtcttaacagacaccttgggttatacttcttcttactgaaattagagacctacagttcttgatgctttctaaaaaagtgttaaatacacgtaacataaaattgaccatcctactcatctttaagtgcacagatcggtggcattatgcacattcacactgtggtgcaactaagctccagaacttttcatcttgcaaaaccgaaacgctgtgctcataaaacaactttgcatttccccctttcctgacccctggcaaccaccattctgctttgtgtttctgtgagtttgactaccctaggtagtcaaactgtgtgatcctagtggatcatacagtatttgtctttttgtgactggcttgtttagtttagcatactgtcctcaagrttcatcatgttgtagcatatttcagaatttccttcctttttaaggctgaataatactccattgaatatgtggaccatattttgttcattcatccatagatggatgcttgggttgcttctgtcttttggctattgtgaataatgttgctcygaacatgggtctacaattctctttgagaccccgatttaaattcttttgtgtagatacccagaagtggaattgctggatcatatggtaattctatttataattttctgcggaaccaccacactgttttccataacatagtggctgtgccattttacattcccaccagcagtgtgccagagtttccaatctcttcacatgcttgcgaacagttattttgtttgtatgtttgtttgtttttggtagtagccatcgtaatgagtataaggtgagatgtcatttggatttgcatttccctagtggcaagtgatgttgagcatctttttgggtgctggttggctattcgtatattgtctttggaaagacttgttattcaagtcctttgcccatttttaaattaaggaatttgtttttttgttgttgatttgtaggagttttttatagatccacatattaactcctcatcagatacatgatttgcaaatatttcctcccattccataggttgcctttttactctgttgattgccttttgctgcaaattcttgatgctttctacacattataaccctgtagaaacaatattatttgctattccggttttatagggatggaaactcaggcccagtttagtttaacttgcytaaggttgtacagtaagtgtcagagctggaattcaagctcgggtcccttggactccaaagggggcacccatcccattcctctgctctgcctgactttccccccttagagctaatagcataaggaggccccatgggggtctgaaggaaggggcgttggttggagaaatgttcagttgcaggtggggaagtatgaacggaaggcctgggaatctcttccattagaccactggggtgccccttcctgtagctcaacatcattgcttagatctcagaaacagcagagaagtgcagacaggttttttagttcagtttgattgtgttttgtttatttgttttcttaagcattttataagcttgtttcagagcccatctgctccttgcagttccccgagcagtccctgtgtgttcacaccacggtgcctttgttgaggctgtgtcatctgcttgcaagactttcaccacttcacacacccccgtctttcagggaggccagttctttgctcacctttccctgcgtcaccaggcagaaggaagagtcccctcctttgcagtccctttctcttgggatatttcccacagcctgtgagttccatgtcttattcattgctctatcacccagcactgtggagcttctccttggctgtgcactctccagtctcagtcccagcctgaaccaattaaatgagaacctgaggatagggaatgggaaagctgtgcttctacaagctctccggggcattcttcctgcagccagcctgggcacccactggcccctgacaggcccacatccagcctggctgcactgagttagatctaaatctggaactccctggaagtgctgcagtcccttcccccgtcctctgtaagtggctcacccctggggtcatggtgtgtgtcctgtatggaggaatcagtgaccccagaccccgggctttcactggaaggggtctgacagctctgctgttcccccgcccctttatgtgcccctgcccctttatgtggccccacccctttatgtgccctctcccctttatgtgccctccttaatccagtgaaacttggcaattttgagaggataggaattttgtttgtttatccttcccccattcattcataatccatttattgagcacccaccataagctgggcattgtggtggacataacacacctttgagtaacttacggtctgctagggaaagcatgttctagccttctgagaggaaaggctgtgtgtgtatgtgtatgtgtgcacgagtgcatgtgtgcacatacgtgtgctaagactacgtgcttgcatgatgtcaggattctgagtggtggcacctgtctgactgggaaatwggagaaagtttgaggggaatggaagatgtgaccctggtgttttgttttgkttttttttgagacagactctcactctgtcacccaggctagagtgcagtggtgcaatcttggctcactgcaacctccgccacccaggttcaagtgattcttctgcctcagcctcccgagtaggtgggactacaggtgcgtgccaccatgcctggctaatttttgtatttttagtaaagacaggatttcaccatatgggccaggctggtctcgaactcctgaccttgtgatctgtccgcctcggactcccaaggtgctgggattacaggcgtgagccactgcgcctggccatgaccctggttttatttatttacttatttatttttttgagatgaggtctggctctgtcacccagcctggagtgcagtggcaccatctcagctcactgcaacctccacctcctgggtttaagcgattcttgtgcctcaccctctcgagtagctgggattacaggcaccaccaccacacccagctaatttttgtatttttagtagagatgcggttttgccatgttggccaggctggtctcaaactcctgacctcaagtgatctgcccaccttggcctcagagtgctgggattacaggcgtgagccaccatgcccgtgtgtgaccctggttttaaatggtggggtgggtatctgcaggggaggaacctggtgcccttgggtgaactgtcaagaggaaggagggggagactggagggctgattctgaggcttttctccatggaagattacctttaggttcattccatccatccatccatccatccatccatccatccatccatccattcgttcatcaaatacctgatgaatacctgctctcttgtacttaaattttggactgtagaccagctgttttagtgtcagctgggagctgttacaaatgcatgttcttagaccagctcaggcctactgcatcagtatctcagggggtggggttcaggaatgtccgttttaacgacctcttctggtgatttttgcacatgctaaagttggataactcccactccagaatgtggactttccgtctcattactgtagcctcagtgcttagcccaagtggctccgtagtcatctgtggactcactgttcacgygccaggccctcttagagaccgggaatgtaggaggatgcttcagggggaagatggcaaggtcagctgaatttgaggtattcctgagccatgtgggcaaagacgcgagacagatacctctgagtctcaggagaaaagcctgggtttgaggtattttggaagtcattagcatatgggtagaatgattagatgaccaaatatatgaaaaaaaattctcaagacccatgtgaaagtcagagaggggtgtggtggcctggctggcctgaagacaggtgttctgatgattctggcaggggcccccatttgcctggcactgaaattatattagtatctttactgtatgagcaccgtgcccatcagggcaagctgtgactcctgtcaccaaacactcaggaaccattgcttttggggcctccaggatggtttcatttgtaggcatctgccttctgttggggtcctttttttctccttctctacaggggacaatatggcaccacccagcaaaacctgatgggagtggacatggactaccctcatttgcagtaatcatgggcaagcaggtggtacccacagtgtactggagaatgccctaccctcgagtaatgttccctggtttgtgcagagtcaggcctgtatggggcagggctttggccagggctgtgctgtagaacttgatcctgaatttatttttggaaagtgaatcctggaacctaccattgcaccataagggctgcagcaatctgaaccctagtcctgcctcatggggtttatgcaaaatctgtttggtaatcaaatggttaatagaaatttaagcataaggcagattgaatacacacgtgcatacactggattcttctgttgggggggaaaggaagtgctcacaattgttagttcccgagctggaaaattctttgcgatctaggagagcttagaaaaatatttgccttagttgcccaacaacttagcagccctcctagcagctagtgacttgttgccacctgactatgtccagcagcatttgtcagagtgatttgactctggctggtcaccaggtaatctgtccaaagttcagaaggtgtcaggatgctatcctgaggctccacagtgacagcctctcagtctgtgcactgtcccccacgggtggccccaaagccagctgcccatttaactgggcacagcatggacactggcctcagctctcagccttctgaggaggtaggtctctgcaactttctgtaaggaggtggctgggtttgtgtgtgtggtgtgcattggtgaggcctggccacaggttccctccttggggacaggcagtcccttgcctgtccttctgtcccttgcttgcratttgccagcagaaaggtgtcagtaatcccggggcaccagaggtgggcatgtattcctacagaccatcgctgccaatgggaaacaggcaaagaccctttctatgaaggccggagcagcagcttttactgggggacaacccatttccagcagctacctgctcttgtggcgtttcctacggcgaatgaaatgtttattcttcttccttcctcagccctgtaagctggtatatgtgagcaggcagttttttgtctttggtgcccttgactttggatttcaagcaagctgatcacaagtttgcccttctgtagggatgtaattaagccactggttttgtcatttcaattacagtagcccaatttagcctgccccccgttaatactttgaaattactctcctcaaaagttgtatgccagtcatgccttcagccctgagcagcagcgctggctggcgccgcttctgagctggcctcaccatggcaggaggccgagatggtgggaggctggaacgtgggcccactgcccagggcacctgctttgaaggcagcgccccctgccccctgcagttgttgctccctgaaagcactttaaactcctcggcccacaccccgcygctggaagagccttggtggagagaggtctgagctttgttagttgggttttgatttcagtacaggagttgataaaacgagataaaccccaggctcaggagggccatggaaattaaacagagatgatatcaaagttcccctgagttttcaactgtgatacagtagctctgttttctcccagactggggccgggaggcacacctttgattccgaaacaatgttcagcatcagttaagcccagcactgctgactttcagggattaaacacactgttgtagtaattctttgatcagctacaagggagcagtgtgccgtctgtatgaagggtctttatagttaaagttcatttctccgtgaacccgggatgacaaccttggctaggtgctgcagtaccgggagctggggcctccccaagcgctatctgcagcactgcaggcagaagctggaagcaggcttgctcctggctttgttgtgtggtttgcatggtgctctttgagcatggcatggtggaaaaaatccttctagcttggaaaacacttcaccttaaccctccccagctttcccattccgtacacttgtgggcgcacatacatgtttgtgtgtgcacgcacacacacacacacacacacacacacactactatcctgccttgccgagggagcctctcggggcagacaacactgcctgaactgaggctctgcagcccccagccttggaaattatctcacagaggctgtatgcccgcttaggggagaggtcagaatggaaccatctggacctgatgacctgcgaggtgaaagtaagaggacctgctcaaggtccagtctgagtccctggcatcctaccacctttattccttacccagcatgtattgagaatagacttagattggcccaatcctatagttctgaaaaatttcaacatttgtcttgtcatccaaaacactgggtcagctttgggggttccctatagagaacttcctcgcagccacagctgggatggcacaagtttccccattttgcttccccctcctcctgattggccctgcaacttccagttggtaatggagcccctctgagctgtcgatcctgctcgcaccgtgccatagatcaacctrttccctcctgtgcggtgcttggatctccctcattaggcctaaatttacctccatcctacacaaacatggccttagctcatttttattgttgtaaattatttatgaggggaatgttgaatcttgaaactgaggtgtgaggaaaattaatcccgtgttacttttatccttctgtactttttcccccttgcttgacttattgagctgtggctagagaaagaaaagctttggcattttaaaatataattagtgttgaaactgctttctcaattggatgggatattggtgcctctctgcctagtacaatagaaaacagaccagacctagggaggaagaccagccgtcccattcctggaaggtgacccggccacctcccaggtttgatgtgagcctcaactgggaaggagcctgagaaagcttctggagagctgcaaagcgctgtccaaatgcaacagacctgttagtgtgttttgcgggcagtttgggctttgagatacagatggatgctggatgaggagctgttgatacaacctggggttgttgccagtaggcctccggatttgatgtgagagggcccgcatgaatggcctcctcgagtccttagccgcggggccatccttcctggcttgaggctccgcgcggcctgggaaatgtggagcgctagttaataaatggccttttgttaggaaggtcaattgaagtgccggtagagacgcagttaaaagtaatttgcagtcagaaaatatgtaattcagggcaagcggctttgagtgatggcccctgccatggatatcttgggcgtttctcattaaaagctgccttggctggtgatggcgcttcctggatgggtcgactgcagcccgcgcggcccggagccatttgtccatatttcacaaaggccgcctccgtccggggcacagcagckggggggaaggagggagaacggctggcgttggagatgctctgcgcgcagctctgcagggccctctggcaggccaggcccggctcctttgtctgcctcagccgggggccgcccgcagccatctttgaaccttctcctgggccgccacagggcattgtgggagcagcatggcttcttccagggcatggtgaccctcctgctgttgagagcggactccaggcagagggccattgtcatcatcgtaccggggaggatactgtgaccaggggatgtggcaatgaatccaccagcaaataagatactgcttattcatgcttacccccacttctctctctcctcctttttctttgtcactttcttttctctctctctgatagtagaggccatactatcttaaaaaaaaaaaaaaaacttacctcacatgttctttattaaattcacagcgtgatattttagcactggcagaattcgtacattctgttaatgagttgttaattgcaaagcattcttggtaaccaacagcaggtaccaatattttgcaaactgcagcaatgttattttcatgttaccaatactacgggatttttcaagtgctgagcccttttgatcaatgcctgctctggatctgcaggtgcagatatttaattctaaacctttactggggacatgcactaagtaaatattcactcaaatatttacttagtgcctactgtgtgcaggaagcactaagccctgtgttttatgcagataaacctgcctggtaaatgaaacttgaaaacagaaaatgatgcagtgatgcagtgtggtaccccctgccctggccgtttagaagcttattttcagaagaattaggtaaagcataactttgttaagctttgttgtaaacagaagaggagactgcagctgtgccaggcacttcctagccttgatsgaggactcagctccattgcattgacaagtctgtttccggagctttttgtgggttccactgacttcatgggagacttgcatacagcattttgattgttcctatttagaaggctgcagtcatttttaatgrcctctgccttttcygattctaggctagaagcaagaatattcctcctgcctgcttagtgaggtagggtgtttggtttgtattagaagcagtaaccagccttgagagatctggcagacctgcagccagtggagtttaattgttgcagaaggaggtggaatttgacttgctctttttcactgcttgtccttttaaaagtacttaggttcatttacatatggtgttgcctcttttatttgctttctggtgcactgccactccagctgcccagacccagtgctctctatattctacctktctcctctggtcacatcaagaggcagtcagcagcagaataataattccattttccctccctttctctcaaagtgcccagcaagaattatgatcattgttagtatttggctttgagtaagtgcccacatgacccgagggtaaaacacaacaaagggatctgccagtcccctatggagtgacgcctatcacatttctgaccagttacctggacttgtgtgtcccaaaccccaccagttttatgtgctttttttgagcgcctactgtataccagggacctctccaggcctttcatttacatccactgtctttgactctcttggtcctcacagcagctctgcaagggtcagtatcatgacctccttttatagctgagaaaatgaagggtccaggaggttaaattgcttactcaaagtcaccagctagtcagtcatggagcctggactccaacaccattccttcacctgagcccagaacacttatttctgtgtttgcaacattccttgcttctttgcaaagctctgcgtgctgaaggcctaaccttggctgtgggtttggaagtctaggcctcygtaggagagattgcaagggagagagaggaaaggtgttgttaagcttagccgtgtctgacatgtcttcagagcagctactggtatctgttcagaaatcaagcagctggatggcggagttaagaatgacgtgctcttgggtttgagtcaagctcacctcctgagagtagagacaagctctcatcttagctcagtgttcaaagctaacctgagaagagtgggaaacagaggtgatttgaattcttgacctggggaaagggtcacatagggtcaggactcattcaaccagtacaggtatgtgaaactcagggtatttgccccaagattctggttctgtttgagactttatattattcacataaatgctatgtttgaattttgtgttttctttttcctttgctgaaccaggaccagtccaccatgcctgaagtcaaagacctctcagaagccttgccagaaacrtcaatggatcccatcacgggagtcggggtggtggcttctcggaaccgagccccgacaggctatgacgtagtaagtcaagatactagtttgtacattttgctcactgattctacaagtatttatctcctgtgtccaagaccttctggcccttgcgtgtaagatgtgcttcttccctctaggaacttaatccagggagggcgtggagagcatcctggtttgggagtcagaagacctgagcccatctgggccgtttcctggccttgaccacctctgtgatggtcattttcaccttctgtaaaattaaggagttagattcattgattttcaacttctggttgtgacatttcgtgaaaaggatccagagtctatgaacgactcctggtggttttcatatattgtcatgcatgtgtaaatattgtaaaggcattgtcctacrtctgtgtagctctttacagtttaaaatgtttcctacccatgaactcatttagctctcttgggcttttggaaggctgggagggcaagtagctgtatcacctctttgctgattaggagaacccacgctctgagaagtcaagtaacagagtcccagtccttggatatggtgaatcatcaggaccagaccccctccaagtccagtgctgtggctgaccacaccaccacagtttagtggagaactttccttgcttttcagcagacatctgtgctggtgttcagtagtcctgatgattggaactggttatgttrttgtttcagtaggtaaattctgattcgggtggagcttgcaaagtacagaggaacgttaggagggtttaattaacagtggatattatcatgtgttctgagattctaaggtggtcttatgtttactttcctcactttgtttgtgacgttttgttcttattcactgaaaatgtgcaccaagaatgcataagagtgaaagaacacgaatctcattagccaacactgaaaacctcccacagcaattagaatagtctctgatgtcctgcagtgaggagaatgtgatgcctggtccagcagaagaagccctaaggcagggtttcccaacttcagcactgttgacatttagggcaagacaatccaataattctttgctatatgttttcctgtgcatcgtatgatgtttagcagcattcctggcctctccttagtgaataccagtagcacctgtccctcctcccccagtggtgacaacccaaaatgtctccagacgtagccagatgtctccaggagcagggggtggctgggcagaatcaccccccattgagaactgcaatggtcaaggcagatctgtactgagtcagccagtgctgggtcctgggtaaggaaggaggagcctgttcaaatgctacacatcccttctccaactgtttgaaagctcataaacattttaaaagtgaaaaagtgaaggaaacttttctgacaaacatttcagtcttagctgctgcttgacttcaaagtgtggtttgaatgtataactttccataaaatagaatcattaggtatggctttgtgccacgaaactctgggggaagctaataaaaatgttcctgatttgagaagccaaagtgtcttttgatgaattagggatgaagcagcaagtcatgaatcaaggcagggactgggagttcccgctgtgggagaggacgggctcaggggtcgctctcctaggagggctctcagggagcttgagcccaaggcaggggtctccccatcttcccatgccctcttttgttgatctgtatctttagcattccgtttgtacctttagggtcatcctgcttgcctgggtagtgggtggcagatggcctttgayagtttggttttctggaagtcttggtaagtctgacaggagcagaatctatccctatcattttctcctaacatctagctcagggcagaagagcgcagtgtcaaatgagtaaaattaataagcacatttcatgattgtgctgtgccatgcattttagtgggaggttagcagggcaaggggcttgagctcatccgcccggtaattacccagctctgcacggccgaggtggagactgcctgggctccctctgaaagccctaacagggagagaggtgggagtcccctcttggtactggcctctggactgtgtgcagataagcgtctcgttccccagaggtctggccccaagttcaaggaaggcggggagggcatggtgagaagagagacttctcattccttttatctggagtttcatattaagtcaatatccaaaccaaagtgcaaggcgctctgtggtggctaggctgcagagatgcttagacagaactccagcagatgaggaagccctgctgcggattgggccgagacctctctctgtctgttgtagctgctgtaggattaatttctccctgcgcacagagcccgttaagtactgccaccacgcagccctgcgagttaggcaccagatggactggtggccctgagtagcacaactgctttaaaatgagcttaggtcccattgctgcttgaggtaaaaggtgccaaatgttcatttataaaaatttaattcaataacttcccttctctctgggtcaggggagccttcttaggctagggggctggggattatttgctaaacttctcaatttattgttccgacgtctgcggtcctctctgaaagagcctcgcttttctgttctgcacccacactatctgggagtgactggtgcttctctccccttgcagtcagagttggggtgagtctcgtgcatctttgtgatgccacgtgcccggagtagtgactatatgtcatagatgactagtgtttgccaaaggtagtgcatgctgttttatcctgggtggatggtcagttttcgaagaattgtaatgctataagaagcacttccggctacartgcctgtgtgcagaatgtaacctttgatttacaagccactctgggatgttgcagtgtctaaagggcatcaagctggacattactgagaatcattgttgggtgtgtttccagcaatacacattttacctttcacccacattcctttgcctttctaaataaatgcttatggccaagcatggtggctcattcctgtaatccctgcactttgggaggccgaagtgggcagatcacttgaggtcaggagttcaagaccagcctggccaacatggtgaaaccccatctctactaaaaatacaaaacattagctgggcgtggtggtgcgtgcctgtaatcccagctactcgtgagactgaggcaggacaatcgattgaacccagaaggcagaggttgcagtgagccgagactgcgccactgcgctccagcctgggcaacagagtgagactctgtctctaaataaataaattaattaataaataaatgcctacaactcagagactgaagctgcaacactatatttatgagatgactctttttccataaaggacatgtcttcttttccttgaaaatatacttttcttggtaaaaaaaaaaaaaaaaaatagcaacacagagaaagtgagacgaatcaaacactccagaacwttttaattttaaattgtttatctatccaccccattttttgagtacctactatgtgccagctaggagctggggagacagcgatgagcaaaacacacacagctcctgccttcatgaagcacacagtctggaggggaagacaggcaatgatggttgcaaataaataaaagatgaaattgggggtaagtgctttgaagggaagtccttatagatgatttatctttcagatctagctttccagataattctgacagcatgaaccccttgcatcctgcttcgaaaaatcactgatcattcccttccttccatacctggaagcctgctaggtgttggagcctttcgcaggagactgcctcaaaggtgctcacagttcttcagcgccagctttctcccctgctaccacatggcgccttttttgttggtgacatctgcgaggttgtcccatggctgggttcagctccctgctcacctggcagctgctgctctggcctttctggcctgtgtaggggttggacaccgctctccctgcgtctccccctcctctgtgaccctccatggtgtcttagtccttttgtgctgccatgacgctatccctaagactgagtagtttataaagagcaggatttatttcttacaggtctggaggctgggaagtctaaggtgaagggcctgcatctggcaagggcctcattgctgcatcatcccatggcggaagtcggaggggcaagagagggagagtgagcaggagggggccacacacatcctttaattgggaacccactcctgggataagactgttaatctattcatgaggacagaaccctcagaacctaatcacttctcacaggtcccatctctcaacactgttgcactggggataaggtttctagcacatgaacattgggggcacattgaaagcatagcatatggcttcccatagagcagctgagaccaaacttacttttagtgagacctttctgggactttggggataatgggagtgagatattaaaactcagaggatcttgacagctgtggtgggggtccaggtccatgctcagacctcttcctagccagccctgtgtcttgctgttggctgccttcatcttgcctacctcagaaaagcattgagagctgccacaccttagcagccaggctaaactgcatcctggtcttagactaggagatattttattcttttttctcactccaatttaagacctcctccattctcttctggagaaatcccacccaacacacaggagtctttctggcaaagtaaccctgaagtgacagatcagcctcaggctccgtgactctttctgaaagtccaggtaagggattcccaggcgttagtgggcctcagtcccctggagggccctgcatcagagttcctgcctgaagggtgctttgcaccttcgggcatatctagaagagcaaaggcctgatgataataagcataggtttcagtggcagrcaaggagccactccccaggaggtctctctgataaccacctataggataaaaatccaaattctttgatttggctttcatgatttcagtgtatcttacagtcttacttccttctgctcatcctttctccagaaccattgaacggctcactttctcacatccagaataagcaggaactttgtaccattgtacctttaaaccctctttcttcatgtttctgaaatgcctatacccagtsccccaacttttaagtaaaacttttctcatccttaaaatccaggttacrtagccccttagtgaaactttttctgaccattactcattcatttatttatttgctcattggtttcacaaatgtttattggccacttagctattgtccaaggcactggaaatccagtatcctgagaaggctgggctccatcaggtgagaggtgagagatgaggatgggcaggtgggtgagaccagatcatagccacgctaaggaatttgcaattattctgagggtggtgggagtcactgggagattttaagaaaaaagaggctcttagacagatgtgtgttttcccaagatcacttggttggcacggaaaacccttcgggggaggataagcagtgaggcaggtgggcgtgtgtggaggctgtgaattcgtgcagagtgagagctagagcctgcgccaggctattgacaatggacatgtgaagcagtacgtggatcctggggctgtgggagcgtgggacgtgggaacccaaatatgtatttttgatggcaagaatgggttgaatgttgggaggtgggggagtagggaggaaggggaaggatgagagtgccacaggatgtcttgctggccatgggtagatgctgggsttctctgctgggacaggagcagagacagccaggtcgggtggaggcgggagggagactcttgggtcagttttgaacaccttgagtttgagctgcttgtatgacatctagcggagccctggggctgaaggtctggagagaggtctgagcaccatcctcatatagcaaggactgcgggcataagtgggcttgtctagggagggttgtgggactagaagagagggtgtgccatttcagactccactaccgtggagggtcactggttaaggatgggtagaagaggaggcactcaaaaggggactaagcctgagcatctggagaggtaggtggaaaattaaagaaaactaaggggaaaagtgtatttctgtaagaaggagtggtgagtaatgttcaaagttgccgaagtgaaaggagcctgaagggtgtccattgggtttaatgcaaggagatggttgtgaacttggtggcaagctcagaagcaaggttagagtggacctgcaaggtaagtgggaggtgacaacgagaggttgagagtgcagatggcctttgaagaggggaggccagggcatagcgggagctagaggatgccatgaccccagctagaggatgccatgactccctttgttaaaggtaggaaagtgtcgaatgtgtctagttactgatgagaaggaaccaaagaaagggaggggtgtagatacaggagagaggggctggctgatgaggcagggcccttgagggggcagaggagttgggacccagagcccagtctgagaggggcaccgggtcatgtttctttagcccttgccctgtcctgcccctgcacgctgggaagccagccttgggctcggcctgtgcgggcagcacatgggccagctgccctgggagtctccacttccccttttttgctgctccygcctccccccatgtctctttctctcaacactatttatttctgaaactaattagacaaaagaaccttttttaaaaaaacaactggacctgtataatttatatatgcccaaaacgtagtaggaatttcctgaatacttggagtttcaaatgcttgaatgcaaatatgcgggactatgggggtcctaggagaggtctgcttctctctgggccagtgggctgggtatagggaacatagggagggataagtttaaaatcccaaacctccaaatgaggtcctattcttttacttactaaagtaagagaaggaaaaagaatctcaatggtgatacaagttcaaacaagcttgcatttttatatagtgctcaaggaatttttaaaaatcacgttatgaaaaacatgtgaagatggcaactatatcttgttaaaaacatatggcagatatcaagtggaaatgtgggacattggcatatcccgtctgagcacagctgtcacatggattttcagaaagccgaagctgtggtggggggcctttcagggggcaggaaaattgccctcgttctccatgggctggaggatagcggcagcccaaagcctcaggcagttagttgcccctcctggaactctgcctccatgaagccaatgaggaaacaagggcagcagcttgttcttgctgtcccagcttcctgagcacagggctttgctatcgtggggctactaactgcagaaataaccacagactttgagtcctgccacacagattggtttattttcaaaaccagagcttgttttgataaaaggcaccaggtgttcctcctttttgttttgttagaaaatacattaagctgagatttactgaaatgcggaaagtggtttttgtaactagccctgggcctttgttccctgtggcctggattagcaaacctcttttaaggtccttccctccacattcccctttgtcctgccgcaccctggccccaagggagcagagctgtggtctgagagaatgcacgtggcacacttagcacagtgctggcatccacgaggtgtgcaggagrcaaacatcagctatcgttaggtgatcctcttagaaatagtggcttaaagcacctggttgcagaggagctggtcttgttttcttctaggcttcccttccctgctaaccatgaatttttcgttttgacccaaagttcccgctaatgacttgttccgtagttgattcatttggaaagtggtagggaacaggcagtgttctggtacttccttctgtttgctaaaacttcctaattccctatttaaaaagccttctaatamtgaaacgtcaattaattggatggttgaaaaaagaygaggcgcttgctttaatttttctttcttttttttcagttaaactttttattttgagacaatggtagactcacatgcagttgtaggaagtactacagagagatcctgtttaccccccaccaatggtaaagtcttgcagactagtacaatgttacaaccaggatactgacattaatacagtacattaatacagaacatttctgttttaaaacgtgcccaggtttttgtttttattcatatatgatgtggccaataaatgaggagaggattgccactggaaagattattactcgcagttcccaagaggagcagacaggccacaccctgtagggccacctggggaagcacaggtggggaaacataggtggggaagcgtggggtgtgtcaggaagcacagagagccagggagaaacgagccaggaagggcagtgtcaagcagggtgagcacagttaggattgattaagtttgaataattttggcaggtcctggggtacatgggtgagtccctcattgtcaggtacctggccctggggtgatttagggcaggggaatcgtgtcctggactgcaagagcccgtgaaagcaggcagatggagataagaactcagtattggttggtttgcatatccaaggcatgcacacaagcaagtcattcacctaggaggggcagtccctccctgcttctgcaagacctcaggatatcaaagcctcataaaatatagaaaaaacctgccaaaatacaatttctatcaccataaggatctttcatgttgtcgttttatagctacactcacttcccttatactaccaccttctccttaacccttgatagccactaatctgttctccatttctataattctggcatttgaagaatcttatataaacggaattatagtatgtcaccttttggaattggcttttaaaaaaaactcagcataattctcctgagattcatgcagagagtctattgtgtgggttaatagtttatttctttttactgataaatagtattccatggtttggatatcccacaatttgtttaaccatttacccattgaaggacatcttggttgttttcattctggagccattatgaataaagttgctataaatactcaggtgaaggctttcatgtggctgtgtttttattcctctgggataaatatccaggaatgcatttgctgggtcacatggtagttgcatgtttagtttttaaataaaatgttaaactactttttggtgtagctgtaatgaatatatgaggatccagtttctcgacatcttttccagcatttgttatcgtcagtatttttttgttttagccattctgacacgtgcatagtgataattcatttggtttcacactgtatttccctagtggttaatgaatgatgttgaacatcttttcatgtgcttatttgccatctgtatgtcttccatgaaaatttcttcatgccctttactcattttctcattggattgtttgttttttttactgttgagttttaagagctctttgtgtattctagctatgagtcctttgttggatatgtggtttccaaatatttctcctagtctttacctgccttttcatcttaacagggcctttcacagagcaaatgtttttaattttgatgaagtccaatttattactttttctatctgtgaatcatgttttggtgtcaagtctgagaactctctgcctagctctagatcctgaagattatctcctgttttctcctacaacttttatagttttacattaacacttacgtctgtgatccattttttccttaatttctggaggctgggaagtccaagttcaagaggcacatctggtgagggccttcttgcttggtgaagattcagcagagtcccaaaacagtgcaggtcatctcatggcgaggagactcagagtgctaacatgctagctcagatctcttcctctttttataaagccaccagttctgctcccatgataaccaatcaatccattaatccaatgaatgagccctcatgatccaatcacctcttaaaggccccacctctcaatactgctacaatggggattaagtatccacaggattttttgaggggacgttcaaactatagcaggtagaatgattccttctactttattctcctttccaaaatgattttagctattccagttatttgtccatataatcttaaaataatcttgcctatatctacaaaaaacttgttggggttttaatggcaattgatgttaaatctgcatatcaatttgaggaggattcacatccccactatgttgagtattccaattcatgaacatagtatgtctcttcatttattagttcttctttcatttctttcgccagcgttttgtagttttcagcaaacragctctataatgttttggtagatttgagcctaaatatttatttttagattttgagcaattataaatggaattgtacttttaattttgatgttcacatgttcattgctgttatatagaaattcagttaatttttataggtttatcttacatcctgtgaccttgctgcactcactattagttctaggtttttggttttgtttttttcttatgattccttgtgattttccacctggacaacaatctcatccttttttctttcccatctgtatgccttttatttctttttcttgccttattgcaaaggatagaacatctagcactatgttacctgtgagagagtagaccttcttgccttattgctgatcataggtggaaaacattcagtctttcactctttttttttttttttttttttttttgagactgagtcttgctttgctgcctaaactggagtgcagtggtgcgatctcagctcactgcaacctgcactttctgggttcaagcagttctcctgcctcagcccccaaagtagctgcgattaacaggcatgtgccaccatgcccagctaatttttgtacttttagtagagatggggtttcaccatgttggccaggctgttctcaaagtcctgaccttgtgatccacctgccttggcctcccaaagtgctgggattacaggcttgagccaccgtgcctggccccagtctttcactcttaagtataatattagctgaaggtgttttggtaggtactgtttatcaagttgagggagttcctttccattcctgtttttctgagagtttttatcatgaataggtatggaattttgtcagatgcctttcctgtatcaattaatatgatcatgtgattttttttttcctttaaagcttgttaacatggtggattaaatagattggtttttgaatattaaaccagscttgcatccctggaataaatttcacttggtcatggtatataattctttytatttattgctgaattctctttgataacagattgttaagaattttttttggctgttacagatgtctgaaaaagaaagaaaaaaatgttgtgtttgtatttatgagggatattgatctgtagttttctttttgtatactgtctgtctggcttggtaatactagattcataaaatgaattggaaagtgttccatcctcttctgttttctggaagagacagtgtagaattagtattaattattttttagatgtttagatgtggaagtctgggatccttactctggctttgttggcatgggtgggtgtggggccacagtattttatgtggcatttggctggggtagagcaattattgtctaaacatcttccctcttgctaggctgccccctgactagagaaagcaggcttctgttgtttttgtttgtttgtttctttggtttttggtttgtgtttactgctgtttctgggttgctgatttctttagcttcaagtctgggatatatgaggcagaaagaaaaccacagaactcaccaccatgttgttccctgggtcatgagatccctagctggtcagacggattatttcacctttcagagtcttctggtgtttgtttggtataatttccagtttttttagttgtacttactgggaagattagggaaaagtatatttactccatattcctggaagtggaagtactggcttgctttaattttatgttaattcagagttagccagagaatctgtttatttctaagcctgtcataaatctttccaaaacatttatgtttcagccttaatattatatatataggcaggaagtatgctattgtgtgcttgtaaaatacttgctagttactccttaaagtatggaagactcaaaatgctgcggagccatctttctcaattttcgtagtccagatttatagtattaaaaggctgtttgcaggagggattatgcaaatcaggaagaggagatgtggctggagatgaggattgtggctggtgagcagtattgaaaggtggagacyactgaagaagagaagagtccatgagatgtctccaggaaggggagatgagactggaaggaaggatctgttctggttcttgaagtaggcagacatccagggaatctgtcagctcacttctgtcattcattcattcatgtctttgtaaagtattgttttgttttaatagtgcaagtattatactgtataaatacactctcactgtaaaagattcaagcaataaagcactgtcaccttccctttcccagaggtaattatcgttaacagtttggtctgtatccctccaatccttttcccacaaatctgcaaatacctatttatagagagaggccctatagyttgatggtgaccttggttaagttactttacctcttagtgcctcagttgtcttgtctcaaaagtgaggattaatagcaggactttcctcatagaattgtgttgaggattaaattagctaatgtttgtaatgtatttaacagtgactggcagtagcgtgagtgttgtggctgttaccttagtgttattattatgtattcttatgcagtacatagtgtgccttgacttttctttttcccttaacattatatgtaagaagtctctccatgtcatgacatgtcactcagcctctattcttctactggtatgtttccctactgtagaataacttagtaaccactgtgctgctgataaaaatttagatttttctttttggtctgtgaaaagcaatgctgatgatgagtattcccattcatacatctctgggtgtgtgctggtggatcaaaggatgtgtacattttaaatttcagtaattactataccaggtagcttttcaaaaatacttcaccaatttatatatactcctagtaaacagtatatccaaatagctatttacccttgtccataccattaccctttattgtcagtctttttattacttttcaaaactaggagctcattttgcgaatgtgcagttctgtgattagcaataaggctgagcatcttttcatgtttcttggccttttgcatttgactgtcagtttccagtttttgtagctggctcatatggctggctttctcttcctggtttctaggcttcccttatatattctgtgtattggttctttgcctgttatatatgttacagatatttttctctcggactgtcaatctttcagtcttgttcatagtatcacattttgttgatatgtttgttcctcttatcaaagttttgtttcgtttttatgtaatcatatctgtcaatctttttctttctttctttatgattgttatgatttgtttggtcttaattctttaaaagacctgtctagatgctaaaactaggaggtgatatttttatgagaaacagtgtatttacagagtctcagagtatcttccacaaaatagttgttaattacaaaggaataaaagtggggaaacccagcagataccactgtaagcgagtgatccaagttaacattaccagtaatgagacaattagatgtcatgtgcctgctgatatgctacactgagaaggacacagcatgtaaatgaccacatggatatgaaaacacatatatacacacatgcgtgggaatgcaatgtatacatatataaatacagagaaagaaggggaagcaaacatagtaatgttaacattttagggaatctggggacagggtatataggaattatttgcattatttttgtagccgatcttgaaatatgaaattatttttacataaaaacttaaaaaaattagaaacaaaaaagcctgactacctcaggataatagaaatatcatcgattttcagctaatataccgtctattttattgatttggctttttaaacatcagatttttattttggagtggagtataaagtggagtctaacttatttttttccaattgtgtagctattttctgaacactgtcttctccctgtggttttgatgagctgcatttgtcatatgctagaggtctttgcatatgcacagatttatgctgattagaacgctcgtttcctatcccacagrtgaaacccacggcagcttctttttccttaatatagggcccttatgcagggaatacaggacataggggaaaaagaaataaactttattaccacctccttctgacccctgatgaccccaagccagactccagctagcaggtgaggggctgatcctggaagccccatcctaggggtctgcggaaatgctgggtgggctttgcccttcaggctgggatgtgaggcccacgtgcatagaggttgtagtagatayaacagcagctacactgcagcaggcccagggccaggggcataaacaatactcaggttaggtcaagtcataccactaacagcaaatcatgcccttaacrttcaacgctacttttctgcttaaatttaaagtactgcattatgagggcgttgcaacatcttgcttataacttaaggcctgctggcttcaaatgatttaggaagcagcctgctgaccacaggaagaaatcttgttgtcgggtggcatttgcttgggccccaaagagagggattttccagaatgtttttaggccgcattctctttaattaatcaatttaacctattcttctacaatagcccactgtttcagtgattgcaggtttatagcatcgtttttgaagttagcaaattgttgattttctaaaaactgaggtaaagtaacataaaattaaccattttaaagtgaacaatttagtggcatttagtacatttataatgttgaacaaccaccacctctatctagttccaaaacatttttatcaccccaaaaggaaatcctgtacccattaaaagttgctcctcattctcccttcgctgccttcctctggcaaccaccaatctgtgttctgttgctatgggtttgcctattctggatattccatataaatggaatcatataagatgtgaccttttttgtttggcttctttcacttagagtcatgttttcaaggtttttagaatatrttttaatgtctgctagaactatttccttccttctcctctttttcaaaattgttttggttactaccacatgttattttttctaaaagaactttagattcaacycgtcaaattgcacaaaatactatgttttgatcctcagtgcaattgcagtgggtaataagttgatttgaagggattcgacatatttgcaatactgagttttcctatctgggagcatgatttgggtacttaggtcttgttttggtacttcttagttaagttttaaagtatcccacagatgttttgtcatttctgttattgtacgtacgtgtttggtttctgttgcgcatggatttttttgatagctttataattgacatacaatagactgcatatatttagagtgtatgatttgatgagttttggagtatgtatgtaaatgtctgggacaccatcatcacagttaagataatgaacatgttcatcacccctaaaaggttcctcctacccttttacaatgcatccctgatttagtttgggtattttgtcaccctgtatctcatgttgaaatgtaatcccccgtggtagaagtagggcctggtgggaggtgattggatcacgagggcggatttctcatggtttagcattccctttgggtgctgtccttgagagagagagttctcgagagacctgatcatttaaaactgtgtggcacctgccttcattctctcactgctgctcctgctctggccatgtcacatgcctgctcccacttcaccttcctccatgagtaaaagctccctaaggccccccagaagccaagcagatgccggtgccatgcttgtataggctgtagaaccatgagccaattaaaccycttgtctttataaattacctagtttcaggtattccctgagactagcaatgcaagaatggcctaatacaagccatcactcccccaaccccacttctaggaaaccgttggtctacttactttctgtcactgtagtctaggttgcattttstagaactttatgtaaattctttattttgtctggcttttttcctctcagaataatgatcttgagattcattcatattgttgagtgtgtccttgtttgtttgtttaatgagtagtgctctgttgtacacctgtatgacagtttacctgttgagggttatttggcttgtttccagtttgggctattaaagtaaagctgctgtgaacatgcatatgcaagtctgtgtgtggacatacacattcatttcctatggataaatacctaggagtggaagggttggattgcacagtagatgcatgtttaactttaaaagaaactgccaaattattttccaagtggttgtatcattttatatcccagcagccgagcatctgagtctcagttcttccacatccttgccaacacttgagatagtcattcttttaatcttaaccattctagtggatgtgtatttgtttatgattttagtttgcatttctctaacaagtaatgattttgagcttttttttttttgccattagtataacttctttggtgaagcatctgttcaaattttttacctgcttttcactgggttatttgtcttattcagttgaaagggttctttgtatattttaagtacaattcctttgttggatatgtatgaactattttctcccagtctgtagcttgccttttcattttcttaacagtatttttgaaaagcaaaagttttaaaatttgatgaagtctagtttattttttttcttttatagttagtgctttttgtgttacatttactaaatctttgctagccctaaggtcaagatttttccttctaatcccttctggaagttttatggttttagttgttatatttagatcaatgatgtatttcaagttaatggttatatgtgatatgatatatggatcaaatatcattttttatatatagctgtccaattgttctagtaccctttctttaaaaatcatctgttcttcattgaattactttggcacttatgtcaaaaatcarctgatcgtagatgtataggcacattgctagactctgttttattccattgatctataagtctgcctgtatgccaaacccatactctttgattactgtagctttgtaataattcttaacaccaggtagtcttttaactttattctttttcaaagttattttggtcgttctaggtccttcaaattttaatacaaatttaagaataagcatgtcaatttttacaaaaaaaaaaagccttctgggattttgattggagttgtattaaatgtgtgggtcaattcgcaggtagttgacatcttaacaatattaagtcttcagatccatggatgtggtacatctcttcatttatgtaagtcctctttaatttctctcagcagtcttttagttttagtgtaaagtctgcagatcttttgtctaatctttcaggcatttcatattgttgatgctattgtaaatggtatttatttttactttaactccattcttgttgatagaaatacaattgatttttgtagattgacttggtattctgcaatcttgttaaactcacttattagttcttataacgtttttgaatatttcttacaacttcctatgtagataattatgttgtgtgtgaataaaaacaattttacttcttcctttccagtctgtatgcctcttatttctttttgttgcctccctgaactggctagagcatccrgtacactattgagtagaagtagtgaaatcaagcattcttgccttttcccacatcttagggggaaagcattcggtgtttcaccatttaaatatggcatttgctgtggattttgaaatagatactatttaacagaaagtacccttccagagggtttttaaatcatacatggatatygaatttcatcacatgctttatctgcttttattgaaattatcatatggattttctctttttaattttaattttttttttttttatggagacagggtctcactctgttgcccaggctggtatccagtctcagcttcccagagtgctaggattacagatgtgagccaccatgcccagcctgggttttctcttttaatcatttaatataatgaaatacactgattgatttttgagtgttaaaccaaacttccatttctggaataaatcccccatgracataataaattgtccttttaatatattgttagattcaattttctaaaattttgttaagaaattttatgtgtatgttcrtaaggaatatggattggtctgtggttttcttataatatctggttttagtattagggtaatactggtctcatatactgagttgagaagtgttcctttcttgcctgttttctgaaatatttaatgtwtatttggtattatttattctgtaaatatttgcagattttaccagtgaggctctctgggcctggatgtgggaaggtttttaaacaacagttcaattttttaaatagatgtagtgtcattcaggttatctattcttaaatgagccttggtagtttgtgtctgctaaggaatttttcatttaatttaatttttctaattcctgggcataaagctgttcaaaatatttccttgttatccttttaatgcttctaagatctggagaatgtactctcttttattcccaataatggtaattggtgtcatctctctttttttcttgctcaggctgccatcctggatcaaatagtagttctttttttagttctttccattttatttttggttatagtcttagttttatcaatttaatcaatcttctcaaagaaccagcttttggttttattgactttttctattcttgtttttaactttattgtgttcactttttaaaattttttcttctgcttactttgggttaaatgttctattgtttaaggtggaagttttggtcattgatttgagacctttcttcttttctaacataagcatttaatgctatgaatttccctccaaactctgaattagctgcatccctcaaattttgttgtgttgtatataattttaattccattcacaatgctatctaatttctcttctgacatcttttttgacccataaattatttagatgtgtggttttttgtttccatgtatttggggacttctagatatgtttctgttactaagaatatattccgtgtggtcagagaacatagttttatggcttacaatatgagtcagcaaacttttctgtagagggccagataatgtatattttaagctttgtgagctatatgatctccattgtatattattatgttttcaactcttgaaaaaatataaaactatctgtaatttataatctgtacacaaacaggctacaggctggatttggcctgcaagctgtgattcattgacttcagcctagagtgtgatccgtcctagtgaatgttccacatacacttgaaaagaatgtatattcttcttctgttgcagttgagtgtcctacagatgtcaattaggtcaagttggttgatagtattgttcaagttttctatattattcctgattttctgtcaatttgttctatcaattattaagagaagggtattaaaatctctgactataattgtggatgagtctattttttctcagtgctataagtttttgtttcctgtattttggtgttcagccattagttgcataaacattaaggaatgatatgtcctcgtgattaattgaccccttcatcattattaagtgaccctctttatccctgttaatattcctttctctgaaatctactttgtcatatattagtatagccactacagctttcttttgatttgtgttggcatgaaatattcttttccatccttttgctttgaacctatctgtgtctttatatttgaagtgggtttcttgtagacaccgtattatctagtctgacaatttcttccatttaattgtggtgtttagccatttacatttaacatgattattgatgtggttgggtttaaatgtaccaatcttgctttttgtttaattaattttttcccatctgttgttttttccccttttcctatttttccaacattttttattaattatttttatctcattttatttcctctgttggcttaccagttctatttctttttgttgttgttgtttctcagtagttgcttttgagtctataccatgtatctttagcttatcacagtctacttttaagtaatacacaacttcatgtgtagtgtaagaacaggatgtttattgttcctcttctagcccttgtgctattgttggcatacattttttttctacgtatgtcataaactccacaatacattgttatcatttttgctttaaagttttattatcttataaaagacttaaaaataataacatagtcttttatagttatccctatggtactatttctagtgctcttcattgttttgtgtagatctgcatttgtgtagatctgcatctgatataattttccttcagcctgaggaacttttttgaacatttctcatagtgttggtttgttggtgatatattctctcagcttttgtttgtctgaacaaagtctttattttgtctttgtatttgaaggatgttttccttgggtatagaaatctaagttggcattttctttcagtactttaaagatgttgckacaaatacaaaaaattagctgggtgtgatggtgcacacctgtaatcccagcagctcaggaggttcaggtgggagaatcacccgagcccgggaagtcaaggctgcagtgagctgtgattgcgttactgcactccagcctgagcaacagagtgaaactctggaaaaaaaaaaaaaaaaaaaaagatgttgctccattatcttatggcttgcattgtttcttataagaagtctgctgtcattcttacatttgtttctctgtacatagagggtttcaggctgtctttaagattttctctttatcactggttttaagcattttgattatgatataccttggtgtagttttcttaatgtttattctgctcaaggctcattgatcttcttgaatttgtgggtttacagttttcatcaaatttgtaatatttctgtttattattaaagtatttcttgttcagttctccctttctgggactccagtgacatgtatattgaaccactagatattgtcccacagcttaaatagctagaaaaacacatggaaggaaataacaaagatataatcagaaattaaaagtaagagaaaaggagggagagatgttaattaagaattgagtctttgtaaaaagcataatagataaacttctggcaaatctaatagtaaaataaaataatataaagataaggaaaatttatttgggaaaaggaaagtaagaatataggaaatttcaaaattataaaagaagatgatgtgtagctcttatgtactgccatgtgtgactgaaattgaaaatcctgatgagttagataatttctactgctatctaagaacaaatcctaaaaagcctgtatccaaggaagaaattggaaatgttgttagagaattatttacaacaaaagcactaggcccaaattgctttaaagtaacattctctcaaattaccaaggaacagttaatttttacatcgtacaractatcctaaagctttgaaaaaagattggacgcttcttcatttgttttacagagctaatttaccaaggtcagttttacaattgaccttgctaatgtaaatggtactgtttcccccacctcattttattttttaaaatggttattggtgtggtttacatgttttgcataaaggaaaattaatttttggccaggcgtggtggctcacacttgtaatcccagcactttgggaagccraggcgggggtatcacctgaggtcaggagttcgagaccagcctggtcaacatggtgaaaccccgtctctactaaaaatacaaacattagctgggtgtagtggcgggcgcctgtaatcccagctactcaggaggctgaggcaggagagttgctttaacctgggaggtggaggttgcagtgagccgagattacaccattgcactctagcctgggtgacagagtgagactccgtctcaaaaaaaaaaagaaaattaaagttttaaaaatagatttctcttacattcaacaacctcattgaattcttgtttctaattccctcccttgcttcctggctgttccatgaccctttagattatggtttaggatgacaaatttatgaggtatgtatatgatgggaaattatgtgattacaaactaccgtgtgtgtagggagtggcaggtgattggagaagaatgtaagaagtgatcgacctgtggactaagcaaatacacgttgactccgttctccacgctcctttcttaaggcctattggattgtcttctaatgcatttccctaactccattctaaccttctccagtcttccctgaactgttgccagtggaaactttccaaaagatgaggttactcacctgcttagaattgtcctctggctctctgtttttagacttacaggcaaattcgttgttttacttaccaccaagcgctgagcacctagcactcagtaagtgtttatgtaatgaatggacttcactggcatctgagagttgtttagatttgctccttccctaattttcatgttctcattctgcccccactcacagttcctcagaggtgctgtgcccatccttgcctctgtgcttttgtgcatgcccaccattcctctccctgtggaattatgttctggttctgtgtgtttcaatggcacccttttcctccattgcagtgcttaccactctttaattacagtttaattacagttaccactctttaattacttctctgtgtactgagccccatgaggaggaggccacagagctatgcctttcgcatagctgtacccccagtacccagcacagggcctggtgcacacattctccaccagcacacacaggatgtttattgaattgaattagctggctcctttctgtttggccttcttgtgtctgggatattggatgccaacatccagctaagttatgtttgtgttaaacatgaattgaaatgcaattacagctggcaatgtgctttgagagctgagtaayagagtacataagaagagtgacttaggcacgaggaccagtttatctcctttcctttcttgcctcctgtcatcgggcatgactcatgaacggcgcgagttcaacttgtcttctcttaaatcccatcacttcaactcttcctgccctccttgtcttgatgggtctctttcagggcccctttgttaaaaccagcaagaagcccagagccaggccttgcagtctgagttggttggagccagaggaggctgcactccccactccagggcagaggtggggccagcaccatgggtaggagtgtgcacggggctgctgaaatgctggctggatcactagttttcactactaatcacatcctgctagtgccctagctaaggcaaacatggtgtcttttatcaaagatgttgccactttaccttagacccattgctttcatagccttctcgaattgcattcaggaattgtgtcttaggtttggacccaccttgaggttaattgatttggcttgatagaaaaactcctcccttcttgttcttttgtttgtttgtttgttttgttttgagatggagtcttgctctgttgcccaggctggagtgcagtggcgcaatctccactcactgcaagctccgcctcccgggttcacgccattctcctgcctcagcctcccaagtagctgggaatacaggtgcccgccaccaggcctggctaattttttgtattttttagtagagacggggtttcaccgcgttagccaggatggtctctatctcctgacctcatgatccacctgcctcggcctcccaaagtgctgggattacaggcgtgagccaccgcgcctggcctgttttttgggattttttttgagagggagtcttgctctgtcacccaggctggagtgcagtggtgcaatcttggctcactgcaacctccgcctcccaggttcaagtgattctcctgcctcagcctcctgagtagctgggactacaggtgcctgccaccacacccagctaattttttttttttttttttgtatttttaatagagacggggtttcaccgtgttagccagaatggtctcgatctcctgacctcatgatctatccacctcggcctcccaaagtgtctttttttttttttttttaagagacagagtctcgctctgttgcccaggctggagtgcaatggtgcaatcttagctcactgcaaccttcgtctcccaggttcaagtgattctcctgtctcagcctcccgagtagctgggattacgggcatccaccatcgtgcccagataatttttgtattttttgtatttttgtagagacagggtttcaccatgttggccaggctggtctcaaactcctgacctcagatgatccgcctgccttggcctcccaaagtgctaggattacaggcatgaaacactgcacccggcctccagaatctttcagaccatgcagttgcttattaatatacctttctattgtttctctaaatcagctggcatgctcattttataaatccactttcctgggtccaaagggagatttcatcaaactttagagatggagcagaggaagagggaagtttttatttattagcagttatttattaagcccccaccacgggcctgtactgggtactgcaaactgagtggtgaatggtcagatgtagcacttgcctgcatggaatttacagacccagactgaaggattaaaatgaaaacaggggtagcagagattggagcaccctccagtggccctcttccttcccaagattaatccyagtaggtgagttctcatttccacatcttcctgcctggcttttgcttggaattccctccctcattgtgctgtcaatctcttcccctcctctgtgtcttcctttccacaaagacatgcctctgtcccctctgttcttagcagatgcggcctccgccaccctcccttcatctcaccagctcctccagccaccatctttgtatgccctactccccaaaatcgtccctgcttgccatctcctcttcattatccccactcacccctcaattcctaaattgtctaactcagtggctctttcctaatccgtattcttctcaacctcatctctactttggttactgttgaccaatttcctcctgccttaatatattcattttctgaatgcagaactagtacatgttcattatggactatgtagaagatgttaaaaagcacaaggaagaaaataaaagcgacctgtaatcctacaactcaggaaaactattgtccacactttaactgtgtttagtttgtatgtgtgtgtgttttagcagtaatgggattctatttatataaattttataacgtgcttattattgcatcatattttcttattgtatttttgcagtattttcttagatcatcggatattcttctatagtccttctttcctaaaatgctgcattccttccatttgatttcagctgcattcagctttgttcctctctgaccccccttcttgtagtagcctctccctcactgtgcaccctgcccagttcccacccagcctcctgcactgagcattcttctctcacttggcgtctggccctgccaggcgccgagcttctgactccacgcagccagcctgtgctctccgtagcacggggcctccatttccaccaggctgctggacaagcccacaaatcgtgaccggctgacacctcaacctgaatattcccaaaccgaactcctcttctgtttccttaccactcccaatagaagacccaacctacaaccacccttcttctgaatgttcccacgagacagaggccagaatccttccaaggcttctctgctagccctacctgccagcaccccatcaggcatttcttcatcttttcatcctcctcttctgtctctgctaccagctggataaggtcctcacaagtcttgacgcgggtagtttcttctaagcagtctctggtgcctcccatctcgactccaggtttctcctataagcgccactctgagaatttctcctycctgcccggggctctccagccacgctccccctcttgctccctaggatggggcaggtcctaagacagcacctgccctgcagcctcccaggttccagctcctcccaccagatctctgtggtcgtatggtctgctctctctctctcatccgcgtggccagtggtccagccaaccccacgcttcccacatgtgccrgggaggacccacaccctggccttttctgtcctttcttctaggggtgcgcctgcccctctgcccctacttcgtttctgcctgccagcactttatgatgcatcccacctgaagatgcctttggttctgtttatcctcccagcagcctgcctcttctccttctgccttatgcttgcttttgagagctctcagcacttggcgctcccttacagcacggaggtgattctgtcttacacttctgatgacaccaaatatccatactgtgtctgcccctgcactagttgcttccacacacagtatttatttcacacaataaccctgccaagttactattgcagtcttgttttacaagtaagaaagcaaagcctctgagagctcaagggtgtggctgagtggaggtcaaacccaggtctcctgcctctgtgtggctctcttccctgcgccctcactcctgattcagctcacctgggagccatcctcggagggaggggagggagtgcctgacatatcataaatggctagagaatgtttgctgaaagaaaaggaaagacttgtgtcctgaagagatgaattgcagcttagtgatgatggcacatgctggggagggctctatttgatgccaggcccgcctgcatatctaggtgcggaagggaagcagtggtttccgatgcaacgccgatacttggcattgattaagtgattactttgtactgaccaaagcactttctttggtgctgtaactacaactgtatgagctaggacctactgtttccatttatagagacaaaagccgaggctcagagaggttaagtaacacagccaaggccacacagccactactggtttgtgaatccaggatttgaatcacatctgtctagtatcaaggcccatgttttaaactctgtatgctgctggcctgcgaggctggtattgggtgatgtggagcaaacattgttatcccagattccagccaggaaggggctttggagcctgccctgctttgctttttcttccttctctgctcagcagatgcaccctccataatgaaatcaccttgaactccttggataccgtggtagagagagggttggagaaccttgtctttaaaattttttaaaaaaaatcacatgacatttaaaaaattatcaaagctcatctcagaaaatctaaatcatgtagaattctatcaaccaaagagtgaaaatattacctttcttttttcctctaatgccaatacatctcgttgacagtttgcaagtatctttctagacttatgtttttctttttaccaaaaaagtatttatttttaattaaataaggaatagaagaatatcttttatctaaaaaaattaaataataacagccaaggcttaagtacctttcaaccacaccagtttgctcatttttcttcctgacttttttctctgcatttatatgtaaatgacttacagaaatacatcgttgtaatttgtgtttttaatataaattagatcatgccatcagctcatgctttatttttatgaagatgtacatatgtcatgtagatctttctagactcgcgtgtgtagaccctccacactcttgttaacgggtgtgtgatgctccgtggttgagtgagggccacaggagccttctgctgctcagcctgtagttcttttaccttcagtttttcactgaacaaagcttttagtgcatgcttccttgttaacgttgttggatttagcaaataaaaatacaggatgaacattttgaaaaaatttttaattaagaaaggtatttgttgtttgtcagaaatttaaatttcactgggtgtcctgtattgtctgtagcaactccattccttatgcacatttgtgagatttgaaataaaaagtttcttcttcaggtctattgtctgatttttaaaattaaaaagttatgttacaaaatattccaaatatatagaaaagtatagggaacaatgtagcaaatgtctatgtatccaccatgcagctcttccaggtcttgatgtttcaccaaatttctgtcagatttcttttttaataaaagaaagaaaacattattgatgcccatgcaacccccaggcccatgcctccctcctttccagagtctctactgctctgagtttggtgtttttcattcctaggtatctttccatgttttcacactttatataggtgatatcctacatgggatatacgtcacacttatatgtatttttcacgtgggtttttttttgtttgtttttttgttttttggcagattttcactcttgttgcccaggctagagtgcaatagcgcaatctcagctcactgcaacctccgccttccaggttcaaatgattcttctgcctcagcctcccgagtagctgggattataggcatgtgccaccacacccagctaattttgtatttttagtagagacggggtttcttcatgttggtcaggctggtctcgaactcctgacctcaggtgatccacccacctgggcctcccaaagtgctgggattacaggtgtgagccaccatgcccagccagcatgtttttttttcttagcattgttcttgagatatttttccttgctgatacagctctagttcatgtattttcaaggggtatagaattatattccatgaatatactataacttagttattcattcttctgttggtgaggatttgggtcattttcaataatgcaatactgtaaacaatgttgtaaataatatccttttgtctttatgctaaggatttctctagggaacaagttaggaatagaattgccggtcattttcgcctttctggatatggacatgtgccctctgaagtggcgtgcaggttcaggtttgtactccactcattttgttggacatttgcagtttggtcagtgatttgctgtgaatggtctagcactgccattttgcttgtgggtgatgtctttttcttattgcttgggaggggctcttttttttttttttttttccccagacagagtctcgttctgttgcctaggctggagtgcagtggcgccatctcagctcattgcagcctctgcctctgggttcaagtgattctcctgcctcagcctcccgagtagctgggattgcaggcgcccaccaccatgcccagctaatttttgcatttttagtagagactgggtttcaccgtgttggccaggctggtcttgaactcctgacctgaagtgatccacccacctcgacctcccaaagtactgggattgcaggtgtgagtcaccgcgcctggcctggaggggttttttatttccttattttggatgttaatctattgtcactgtgcactgctcccagtctaaggcttatctttttactttgtgtcttgtgtcttacaaaggatccctttgggatccctagggatactacaaagtatccaagttttcaattttagggtagtaagattcatcagcctattcttttatagatggttttgtacatgtccatctatttctttaataattctctctatttaaacataaatatactccacatttttttctaaaagtttggaagttttgcttttcacatttcatctttaatccatcaagaatttgtttttgacaaattgaggtagggctcaacttagtttttcctctgtagtgacgatcaggtgtctgggtactattgattgactagtccctacttcagccactgatgcgtcactggcagtgccgtggtagaccaggtatcctgtggctgagaggagccggccttcccctgggtgccgaccagccgcaaggcaacctctaggctgctgatgctgctctctgcaggcttgtggaggtccagggccgtgtcatagcttggccgtctgggtgcgacagaaacgggagcacttctggcccagagcctccttcctgatgacttggaacagggaggacgtacctgctgcgatgcggccaggtgccctgcctatgtgtatctcccatttcctgtctcgtgggccccccacggaactgtcttccctgcctggctcccttcggccatcaggaggtgcagagccagggctcctaatcccttcacctctacaagggcttttgctgggaatagggacctgctttctgcctccctgcccaacctcaggaagccatcccctctgtgcctggcatggctaaggcacctgtgccacaggtagaatgaggaaagggctatcttgtgtagtcctagatgcaccaggctttagtctttgtgtgtttttcctaccatgcattcttttcatggttcaatggttcaatcagctgtttggcaaatatctgattgtgtactgtaaacaaggcatggggctaggtactcagaaaaatattccgtgaataagataagatctttactttaaggaccagagataatagtaagtaggtaacatttttttagtgtcaccatgtgccaggccttatgctaagtacttctagaaatactaacagctttattgagatataattcatataccacaaagttcactttttaagagtgtacaatccattggtttttagtatagccacagatttgcacaactatcactgccacctaattttgaacattgtcatcacctgctaaagaacgctccactcattagccattctctccatcaactcttcctgccccccagtccctggcagcaccaatccactttctgtctctagggatttcccatttctagacttttcatgtaaacaaaataatgtaatatgtggtcttttgtgtctatcttattttatttagcaaactgttttcagggttcttctaagttgcattatgtatcagtataccattccttttatgaccgaatactatttcattgtatggctatgccacatttttatcagttgatgaatgtttggattagttcctcatttggtaattaagaaaacatgctgtcatgaacattcacatgcaagtttgtatgtagacgcttgttttcatttctcttgggtatatacctaggagtagaattgctgggtcatatgctaactctatgtctaacattttgaggaacttccagactgttttccaaagtggctgcaccctgttacaatcccaccagaagygcagagggctcgcattcgtccacatccttgccaacatttggattgcctgtccttttaattgtcctgtccttttaactaccatagtggttctgaagtggtatctcattgtggttaagtgccttttgtgctttctctcatttaatccttacaaataatcctatgaggtaggtattatttctattgtcatttttaggtgaggctcagagagtaaaagagtgactttggaaaaccctagtatgtaaatggcagagctgggacttgaactcgaatctacccaacttcagaaatccaagttcttgcctgctgggatcatcacagaggctgtagagtrggggattctttcagccaggccctaaataatgagatcatttcaacaagacagatgcgagagggagcaacacgagcaaaggcagggaggcaggaaatggcggggcacagttaggaaagacctgtctgagaaggagaactagagtggaaagcgggtacagtactagggttagacatagaggcccagaggggtgcaaggccaacagggctgggtggtccactgtgtccctgtgccccgtgagtggaaaggaccacctgaagactgaggcagatgcatttgtctcagggaacaggtttatgtttttcatttcttttgctaaaaaaaagagacatttcagctaaaggtataagaaaatgatgcaaataaaatcagaacygaaaaactgagagttcctgacctcttcactggattagtcaaatgcctcttcctttcactttatatttgtagaaagcatcttgagcacaccacctgttagggagtccacggatggttggataggctccttgcctctgctgtgcccacgctgctcttattgagtttaagtggctcacagttgcccgctgtctggcctgggccaagtgtgtrtgtttccactgctgatgatctaacatacccagaggcctatgaacttcattcttgttcatcgtgtcagccagatatttcctttggaatgtctgcaggatttcctggcccctttcattgctttctgtctgctgaatacacctttgaattgtgggtgggctctcttgaaacaccggtgtgtaaacagattgatgaaattggtggttagcttgtcttttgagagtttctctttggcaaggagcactcaattccaacgttgaagaacctctgacggttgaaatgattgactgcgccgctcctctttaggtggcttagttggatagctgatttacaaagtgcttctcaagtttaaatccagcggatttttatttttcaccccatcaaatgaagtatttaccattatttttcttataaaagctatatatgctcattaccaaaaaagcagaaatacaggggaaaaaaaagaacattaaaaatactcataatctcaactgtgcagagccaaacagtggttaatgctttgctttatatttgcctagatccttttctatacagataattgttttgaaaacaaactaaagtattgtactttataaaccatgttgtaacttactctttctcctgaactttccgtgttagtgtgtgtatgtgtacaaagttgtttcaaatggctgttgagtcttctattgtgaggatgtcctctaatcattaraaatttatcatctcccactcttacctttataaactgagccccaataaacatgtcaataacgctcatcccatcttaccaggctccagttacagagccccactttctgtccctttaatatgacaactttatttctaccctagggtcttcacagtaactgtctcccaggcctccggcccccagatctttcagggattaagggagtcccttgaaccagggaggctgcttacatttaacctcagcggtctctttacagtgaacatgccttacaggccagcctcaggtagycagtcccactgtccagtgggctgttcagggcttcctgaacgcacatcatcctctgtgactgctgcacagtggcccagaatgtgacctctgaactcaagctagagaaagcaatcagagacctgggctatgtgagacaggggtgggggccaggtcccgaagggtttgtagagccttgtgtcgattctgtggcactggcagccaccatcccagggactgcctgggtgctgcagctccgtccccagccatctgcatgttcagttttggtggactgtagctgtggggaaggctggaatcagctggacttgcagctttggacattgtcacccacttgggaacacactaacaagctaactaggagtgagattatgttgcattgctagtcatgtccctgatggcagcaatagcggcagcttgcctaaaagaaataacgaattatcatactatcttccatgagatatttccccagctctctttcaaagttaaaatttgcttttactttaacaaagtgatgcctgcgtgcacagtttaaaaaatcagagtgctcataagaaaatatagcagcccctgccctgtctccccaccttcacctttttatttcctagaggcatttattttccactttttaagatttttttccctctagtactttatctccatatttctaagtaattttattatattgcttatttcttgattattttcttctcttataatctcctcccattaggcagtatcacaatttttggtggattaatgcttagtgtttacatagattacaatgcagacattgaataccactgaatcaagtaacatattaggagtgtgtgttctttctcatacaaccttttatttttttcttggaattaatcagacttgtttcattcatttgaggagttgtccgggtgcctattgattttcacagtacgttcttaaaatgtctttttaatttttaaattgattcttttttttttttttttttttttgtcaaatagccttaggtgcattgttttcattgttctaaatgctctaaggcagttgtcacatgcccatccctatttctttcgaacgagaaagtacagttctaaatgctctcccctccacatcccctcctccccagaggttgctgccctgacgtctcttcctttccctgtctgggcctgggcgtgctgctgtcctctggctgctgtgctgtgtgggttctgtttcctggagtttatggtttcccctttattgatttaatcctcggttctgctgatgcatcctccagtagcttcctcagaaagggcccctgggagataaactttttaagtccttgcacatcggcaaaggtctttattctaccctcacacttaatcgataatgggcttagatgtggaattccagagttcctcagaattttgaagacattgttatcttgtcttttagtttctaatgttgcagttaggaagtctgatgcaacatgattcccgtccctttgtatgtgacccgttatttttctctgcaagtgtttaaggtggtttctttatccccagtgtggtgggattctcggttctttcgttttggggtgggtctttttcatccacttttgtggaaacactcaggacctctttaacacagaggctccccctcccctccggtttttattttaaaagttctttctgaaactttttgttagctggatgttgtcttgacccttcagttttcattcctataattgatctcttcatctctgtactttaccttctggaagatttcctcagctttctcttccagtgtttacagtttctaatctctttatattgtcctcaaattgttcctttttaaaaacgttttcataatactctgttcttgtttggtatttgcagtctattcactcatccctctgaggatttaattacagactgggttctctgtcctgagccggcactgtttccccctattctctttgctaccttcaagctcccttttttctattttgggcccttctgtcatgtctgagcctgtccccagtgcctggtgaccctttgttgtgggttgggatttaagatggaggcaccagctcatgggctggagccctgtgggtggggggcctgctggctggtgtgctacacagtggggcgacgagcagggagctggctcagatcgtgggctggtccaccctggcgctttccagagacaaagccctcagtgtccagtgttcaggggaggcggctggaagcaagaaggagggtaagcgcgggtggcagggaggggcctgccattgccattcagtgtgtacgcttggttactcaattaccctcgtttccactctgaagttgcacctcctcccccacctcctcctgacctccagcctccttccccacctgccgggcttgtagagtcctgagctgtgctgggttcctttctgcagaagatacacctgaaactggggtgggcacctgggagtctaaccactttgtttatgaaccttgtttcagtctacccaattcagccctaaacttgcacttgctcccccgcccccaccccaatggtgtctggtgattctggatcctggggctctgctcagtatcggctgccacgggccccttaggtcacaacccgccccctcccccacacttgctaaatcccttgccctccgccttctgcagtgccaggcctttgtgctgcctctcccctcttgctcgtcattgtggaggcttctgcactgtccatttgattgttgttttagaagaatcctggcaggaagagagataaaccatgtgtacattccgccactgcctggccctagggccctcctgctcctcctcagagacagctcctactcctggggaagaaatgctaggagagaggttgtgagaatgtgtgagtgtgagtgtgcaagagcatgtgcatgtgtgcacatgtgcacatgtgtatgcgaggccctgtaacagactctgaaggttctgcagtcagcagacatatcgagttgtcttgggaacaaggcagcaaacacacaagagaaccaaaagagtaggtggcctcagtgctgaaatggatatgtgtctcagagtggtgattttgaaggggattcactcagctcaatggattaaatcctggaaatttcatttgaaaaacttcccgttaccttacttgggtagctgacagggtatgtggcttttcacactgccctgattgcagagttgactcgttcatttatyctttcaacaaggtttgatggagcccatccgtgtcaggcattgtgcttggcacagggggtaaaatggcaagcagaacaggcactgccgttgtccttgtgaagcttatagtccagggtgggatagcagcgggagggcagatgttcctcgtacaagtatatcatttgtgtttggaaagaccagctttgttcccagagattggcacagagccccgggacaactgaggactttttgaatcctgatgtagcctgacatcactttccagacttggttcgctgtcagagcagatgtccccttttttggtttagaaacattcgcgctgtctttggagtgctcatgcactaaggcaggcactttgcatgttcgtgggctcctgtgccccggcagtgatgcccgcagggaaaggcagcatgtccactttgcagaggaggacaggactggtttaagctattgggcctcaaattcaagtctgcctctgaactccatgttgcgcatgctgcacgcaaagcatttggtcctccaccccacaccccacctccccccagcttcctgatgctgggacctgaggctgactgctgagtttgtaagtttctgcagtgccgccaggtgggcgtgggcactgtcaggtagaccctgccttgagtcagtggtggaggctcctcttgacactgtgacttcagccgcatagatagatcatttatcttgcagatcattagctctcctgacttgggatgggaagaatttaggttattaggcacctttatgtgactgggttgggaagacacctctgggtacatcttgttgctgtaggaaagacaggccagaaatgccccccttgttccaccagggctgcctttccagtgctctcaaagagccaggaacccacatctcactcctcacccagtacctggtcctgtgggtccctgaaccatccagccctccaggaccattccagagcccttctctgcccagcactgccttccttggaggttaggggagtctctctctctctctttctctctctctcttctctgtctctctctctctctctctctctttctttcttcccacctcacctccctgggcccttcatgatgcctttacacacttccacgtcattgcaaatgagtttgggcccaggtcaaagctgggtctttggtcatccttttttaatgcttcgcagacaaggactgggaggctctaactgcccaaacagtgaagcgtgggctcaaacagaggggctcacgttgccggcttctcccattacattttcatttctcactctgaaaaaggacagttctagcagtgtggtgggtggagagaaccatcattggcaagccctggagacctttctagccttgggttagaatgcacagcacccctctgtggcacttccagatatccaaacaagcccttctagacgcccttgtctcttggaacgttaaagacacagctccctgtcttccaaggcagcttgtggttccacagccttggagcgtcctgcagacagtttctgtttttgaaagtttttcagaaattatgcatttattatagagagaccatgtaggttccctyattccctttgtttagagcatcttttatttttacattttagtgattctgaaattgggatgcatcttaaaatagatgcatgtgtttggatatggtgctgtgcctttttcgtgtgaaggggtgttccccaaatgactgcatcctagaattgaggaaatacagtaaarttgcattgggagacaaaaatctttcaaaacatgtaatsywtkggagaaaacaagcatagggggtgctttgtgtggaggagctgagaccactgccttaaatctcatgtttccctagaaactctatgtgtgaccattatggggaaagatgctgacaaggcctgacccccattcgatcgtgtttctatctgtgggggtgacatacttggagcaaacagttcctaaaattatccccataccattcctccttcagctttcaggtcaaatatatttgcatctttatcataagggcctttcttttcctgttgttatatttgctaatttacaattgtttggtttgaaaaacaaggattttttcttttgcctcctggccttttggtttttctgaggcagcctcagagagcgtggccgtggtgggctccaggaatgtcctggggagcctgagcccactgggctggggtcctggctcccgcctccgccctgagcctgtgacaggcagaggccatccatgtgctgtggggcctgccatgctctgtgcagagcctgcagtcagtgtgygggatggggctgaatcagggcacttttgtgtgaagaatggaggcacttccagccatttgtcaggatgggcgggagcttgtcaggtcaaggactggatcccaaagtctgaagctcaaaaggacaacccagaaggagtcagaaagtgaactgctcagagacctcctgcagagtttatcccaaaacaggcactgctcctcagtcttcctggatgtcccccttcgcggtgcttaaaggaaggtgtgcaaggttgattcatgctctcagagggaggctgagtcagaaaacagaccaagccctgaccagcgattcacagagcagtctggraagaaataggaagaaagcaccgccctctcctagccttcttctcctcctcctctcccatctcctttgcactctctcccacaaagcctggtctttcatgggaatatcccccagcccagccccagtctaggtcacaggggctttgatactcagatcaaggctggctggcgtcattctcagactcttcctagtgagaatttctacagctgcagatgagaaaatggcttcttagtgagactagaaacaaggaaccgagtgagtcttcttttgtttttctatcctgatccagtttctcaccttgaaccccactgtcagggcttgtaccaagaggacgcagggtggagtgaaatgtttctgacctccctccctgccccagcctccagtagaatcccgttgactgaagcacccagctggtcctggggccctagagcaggaggctgtgtcaccctcgccgcaggcagcgccccctcaggtggctcatcacasccagtggactcctttcttcaccccgcaccatccccccgagtaagtggtaatagccgcttaatgtactgacttacccaatcccttcttggtccattacgacaaaagttgctcttttctcattagaaycatttttgtcagggtgtctttaatcaatggcttccccagggacagtatttttagaagttgtgtttttcacaccctcccttttggaaaatctcatcccagtgcctagtgaaatgagctaatgagatgccgggagatcccargctggtgttaattggaacaggcgtggaagaagtggcccacgcgcaccttcagttccttcctgccttacctgcratccttttctctgtctctccggtgtaggttgcacagacagcagatggtgtggatgctgacctctggaaagacggcttatttaaatccaaggttaccagatacctgtgtttcacaagatcrttttccaaagaaaatgtaagtctagtcrtagtttccatttgctgagtgagcacaagtaatttacattcctgtttggaatttcctcattttgttgttgttgtggtttattttcattgccatattaatttatctgtggttttagtgaactgggtagaatcagcagccagcactgtgtttcatttattaacagtgttattaaccacgtacccaagtgtaccgtgaattccattaaattgtgttctcaaaaggaaaccaggaaatttctctcccagctctcatttgcctacctttcctccaagcaacagatcacagggtagtgcggcagtgagagttctccagtggagcgggatttaatgctggccagcaaaggcagcatggctcagggagggcccctgtgaccccaccccatgcccttgcttccacagtgacgtttcctcgctctttgagtctctgtgtgacatatcacatttcgttatttttgtaggtaagtattgactcatgtagatttctctatgcttttaaaaaaaaaaacaaatacttgcacctgtaaattaggaaactttaaagatacctactaaggtttttttttwaaaaacatctaataagatattttaatagatggcttagaaagaaaggaaatagctttggtgagtatctgctctgtacaaggcctgccctgggcacctcattctgtccccaggtaatctctaccagtggaagttcctttccattgaagaaaccgagatccaagagggaatatgcttgttcaaggttacttctcttccccagccccaaacagggagcagttgggattttcattttcagggctaacattttatttttggccatatgttattgtctctttgtcatgtaaatttttattttgggaaatatttttatttatttatataaattatattataaaagtaatatttatttgcagttaaaaaaaaaaaaactgaacccagacaacaaatatcctcattcaacagcatgaaagggggagagcattagtcatcctctctgccacctggccccgcaggcccagggtcccatcacagggtcctggcgtgtccccttggtgttttctgaatatcgaccatcatgtggctctctggcttgcactcttttctgccacccattcctgttgtttgtggttaattctttgatacgataattattctgaacatatacaggactgggagaaaagtcattgctttattttttcccctaattacaagagcaatatatgctccttgtgaagtacagagtttataatggagtcaggggaaatcttgacacaaaagtctggaaatcttttcaattcaggcttttgagtgtattttaaataccaggaaggtggcagggctaaagagtggacaagggcactgagatcttataatgagtccctgcaggtsccccagctcactgagcagcctgaggtacccaggagtgggctgaaggctgagtagaggcttcagttaaaaatgagtagaggccgaagaggcttcagttaaaaatggcctgaggacagccatgatctctgtgatcattttttaattttgttttcattgcatttccccccagagactatggggtgttggtacctaggctagcagagtccctgcatcccttggagtggggacagtgacaggcctgaatgtgacaaagagaagtcactggggcttgttagcattgggtgtcatgggtaagtgtattaaagaaaacacattgatttcatcaacatatgttgaacattaaaaagatatttattgggcatgatggagggatgtaagaagaggacaagggcagtgtgaaaagcctctgcctcacttttgaagcagagtaggagataggtgcgtggtgcatattgtttttggaaaaagaatgaatggatccaatagtgcgatccaaacgatcgagtaccagcagttggcaggggcccacttgccagcccaggagtggaggaggaatcagaatattttaatctgttacagccagtctatgctggccctgtartccaaaccaagactttgcagaccatcattttttacaactgtaaaggagggatgtggggtctcaagactggacagattcttaattagctgacttgagactcccaatgtaggagttttgggagactcctttggaacccaaattcctttcccccaataatgctattaatacagaaatctggctttggagtgacattgcttcctggggaaggatcgagattaattgcacttttcatgccctgtactttctgcattacctgtaataataatgtacatagattaggtagggaggatattaaacagaaggatttatgaacatttgaatattaagttggttatctgtggctaccttaaatgcaaggttgtcaaaaataattacagtatactagcaaatactggctaccagagacaatataaataccctgagtcagtgcatattgggcttttggcatgaatcatttgctcaacaaggattgggaatacgttcttcatatttatgaggaggaaatgaaagagagaacagatgggggaggggagaggaacaggcaaaattaatggtgtcgcagacccactgtattaaacccagtacagtggcagccctgtgtgaggagggaccacagttgggctgtggggagctctgacagtgcagcctcccattttgtatgcatgcaagggttttttgatgctttgtttttaatggccacaccactgatgttcaggttttatgatcagggacattggtagagtgtgtggagggtgaggtcactaagtggtttgcagttgacttctgtaaaacccaacttgtcaagcagaagacatttgagaaggatattgatgaatgcccatccatctgcggggcaggaaaacatgcctagttgttaatttctcaatgcakaaagcagtgatgacatggaaaagcaactgccatgaaaaaaaattatgatagattagaccaggcgactctgaaagcagctgatgtttgcaagttaggttaacagttcaaacccttcctacacggtcagagatttattccgtgttctgagggtcccacttaccactaactaggctgcactgtacattgtcttcccgaggcccagctacctggaatgtcagaatatcaaattgttggcaaatatgatagttctgagaggaagaaacggtttcctgatggcagtgccgtaaaaacactggtcatagattacacttgctgctatgaccttcctagttaaattctaataattggtttcatttgtgtacttttggttcataatatttattagtgtatatcaatacttttgatatttttaatcatatagtttagatttgacatctcagcaaactcaacttgatatatgtgtgtgtgtatatatatatatgaaacgaagtcttcctctrtcgcccaggctggagtgcagtggcacaatctcagctcactgcagcctccacctcctgggttcaagcrattctcctgcctcagcctcccaagtagctgggactacaagcgtccaccaccacacccagctaatttttgtattttttttaagtagagacagggtttcaccatgttgcccaggctggtatcaatctcctgacctcaagtgatccacctgcctcggcctcccaaagtgcttggattacaggcatgagccaccatgcctggcagatttttttttttttttttttgagacagagtctcactctattgcccaggctgaagtacagaggcatgatcttggcttactgcagcctcaacctcccaggctccaacaatcctcctacttcagcttcctgagtagctgggactacatgcatgagtgccaccacacccagccaatttttttaatttgtagagatggggtttcgccatgtttcccaggctggtctcaaactcctgaactcaagctacccaygcactttggcctcccaaagtgttgggattayaggcatgagcaacagcgcccggcctccagttcgatttgtgactctgagtggcccggttgaaaaatgtgcacccgaaattaatttattcagcaagtagttactgagcacctgctgtgtggcaaaaaccatgctaggcttgtatttatagtaggaacagagatagttttggtcttcatggttcttaaactctagaagcaagacagatattaaacaaataaccccataaattgataggaagggaaaaagagagtgccaagagggaacataacacagtttagatgataagaactccctgcttggctttcagagacgtgacacagtgcaggtggaggtgggatcttggctcccatgtgcagagatggaggtagcagcccttcttctctaagcaagatggaacaacagcctgagaagttgctgtccagggcagagtgatggctgaccaactagatgcttgtccaaggatgctgaacaagtaaacagagagcatgttcacactgggcttcggggatgaggcasttctgcaaaatgggcacgtggagtgcactgctagtatcctaacaggagagatttgggatttgagcccatcattctttccttaactggctctgacgagagagggggaaccaagctgcaaattactctgaagattttaatgaaatctccaaagtggccccacatatttaagttgtagggtagatatctttagagctcatttccagcttgaaatgtgggctgcaagtgctggcgtgtttgcaaagaattctctctcgcaattacagaatggtgtactgtcttagaaagatatttgtacaccagttaccgaaactgcgcactgtggaccccatatactaccactaaacagaaactttaggaggcccttgtgcgtgtcattttagaagatgtgtaatattgaggcagcagggctttcactctgtattagtgtatgattcttgggattttgcagaatgtatctagcaactgaaatgtgtgtcagtatgcagactggtgatcacttaggagagtgattggttccctgttaggtttagatgcagctctttcctacgagtgcctcaggaatttgctcttcctaaaacctcctggccttgagatctgatgctcagggctgaatggcagcctggtcctgggacctgtgtgcacagctgccctctgctgggttatgtctaaagcatctcctgggttgctcctgcctcaccaaggccgtgtctgagttgagtggctttgaggttccgcagatgaaactccttcccaggggccacacgagtccctgcataaccactggggaccattaagtgtcacctactctaattaacctgctgtcataaagctgcacgagtcattgtgttaaatatgcatctggaagccaaaatggcaaacccaccacatgcatgttcagattaatagtctgtatctcttttctttcttcccaagagtcatctggggaacgtgttagtagatatgaagctcattgacatcaaggacacactgcctgtgggcttcatcccaattcaggagacggtggacacacgtgagtcatcctttagtagcactcatcacaatgagcgttttcttcctccaggtatatttgtaggtgtttttctatgtgcatttttcttcagaaacacttttggaggccttactacatgcccatgaacaaaccctgctgcttttgatgtgtgtctggctgggttctccaaggagtttgcagagtattctgggtagcagcatgtaaatgagcagaacgtgcctttcttttagaatggtgctccctgctgaatcggctcactggggaatggaatggtgaaactatacagtttgtctttagtccttcctctggtgttgctgaagccaagcttggcataagacccagaaggaagcggaaagaaaacaatcaaaagacgcccagagaacacaaggccaataatgtgcccatttggggcccgttgagcaaacaagaaaagtgagaatcaaaaagactgcaaattaaagttcataggttcgaattggactgaatattctgaccactgagcaggtccaagcagaagtgaatcactgaggaatcggcagcgtcttcagggtgttggagcccttggagcttcttgacccacacatgggttattaaatggtgctggaaaacctctggtgattcggcttccttgttttggtgtaatttaacttaccttgtttcatttttaatcactggtcagccaactttatggtatttacaacagtgaagcaatgaatacaaaacaaatacagagaatcctttcattacgactcagggtttatttattaaattctctgtctcattttctgtctcatactttattctttcataattagccccactttggtcccactgttttttgctgttttcttgctagcacttcatatgatatgaactagagtttctatctttacgcagatcccctgctgttattttcatgaaaccagcagaccccgttgtatagcatatttttattttcctgatggtctcttcacatttcaacattggattgctttttgtcatttattattttatgtattgcctgataatcataacagctgatatttagtatgcatttactgtatgttcacccctgtgataaatgctttacctccctgatttcatttaatcttcagaagacccctctttagagatggacattattatacccatttcagatatgagaaaaatgaagcacactcactccttagggattaaagaacttagccaaggtcatgcatctggaagtggaggaataactagaatgctcacatacgtcttactccagccacacttttaaccacggcggcacactggaagagcatgtgtataagcaccttttacagatatgttttatattaatgtacagagttttaaaaaattaagctataactcacataccgtgcaattcacctatttaacatgcacagttcagtggcttttagtaaatgcagagttggcaaccattatggcacattatatcacccccaaaacccattttcaggatatcacccctgtaccccttagcaatcactctcttattgctctccaaccctcacctccccactccccgccagccctaggcaaccactgatctactttctatgtagatttgcctattctggacatctcatataaatggaatcatacagcgtgtggtcttttgtgaccagcttctctcacttagcatactgttttcaaggttggcccacgttgtaggatagatcattayktcattccttcttatcaccaaataatataacattatatggatataccacattttggttatccattcaactgatggatatctgagttgtttgtactttttggctgttaggaatgaggctgctatgaacattcatgtacaagtttttgttgggcttatgttttcgtttctgttgggtatctacctagtcatggaattgctgggtcatatggtaacttggtatttttgaggaactatcaagtgatgtttcaaaggagctgcactgttttttattcccaccagcagtgtccttagattccaattcctccacatcttcaccagcaatttgttattgtctgtctttttgattctagtcatcttagtgggtgtgaaatggaatctccttgtgctttctgtttgcccttctctgatggcaaatgatgtttagcatctttttctgtgcttgttggccatttgtattatctcctctgcttaggatctacagttttctccaagacttggatcactttcctccttttcccctgtgtttttcacagttttaaaatttgcattggtgttcgttttttgacagtcagttgacttcgaatgtttttatattgatgtgctgtggagccacaatgggttttccattctgcattttcctctaggttagttggaccagttcactgaggctctgtcctgtctgggcttggggcccagctgctgtggggcccaggggtcctggttgggaagtttctcccttgtgactgggagtacacaggttgctgtcccaagtgtggactctgagatcggtcctgggcccaatgccaggtgccttgtcacacaggagggtgggcagcagggggtctcttcatttctggttctagcaacatttcctggagcttttcacccagggaacagaggagcccaagctggccacataagccttatgatcagctctgtatcatctgagagtattcaagaccctgattttatacagtcagccaaaaacaggagactcctgtaattcattgaaaatatggtttgctgtaatccatatagcactgaaaaactggaagatgtttgttttagtaaagtgctgtgtactttctctgtgttcattagcatgactgaacacatttctattgactatgtataatatgtttacttaaaattaggcctgcttaagcatgtgtaatcagtggctccatctcttaaccccgagtttgctgcagacggaagaatggagccaagagcagcgtggcaacagcaagtgaaacacccggcgttagttttctttgtgtaaaggtctctcttcttcgtgctttctaaggccgatctgatcagctgataatctttgaagttgcagagttgccatgagcagcgcccccaactccccaggttgctgtcccaagtgtggaccctgaggttgggtcttgtcacacaggagggtgggcagcaggggcctcttcatttccagttctaggatcatttcctagatgtttagcaatgtttagggtctggattcagaacgttgtttctctctgctcgtagatctgctctagccctcagtttctgtgcctgaggaacccacagttatctgactctttaaaaaacaaccctacccccctcaaaatataataacaaaacaattccactgattttcttgtccccctccccactcccggcccctataagaaaccctgggcaggactgtacttcccctcattctgttcctcaatttgaatgtgctgttgaatgtcttacttcctgccacagaattgcaaggtcttgaaacccaataccaagcacaggcataaattacatgctagaggcttacttgtcaataatgacggtaagatcccacacagctgttctttactgagcacttactgtgtgccaggcactgggctaagtggatcatatgtgttggcacagtgcatccaacccacatccctgtggggtgggtttcattaactcccttttacagtttaccaagactcagagaaattaagtaacttgcctgaggtcacagtgccaggaaatgttggtgttgggatttcaacccagatctgtctgactcgtgtattaaatggccgcagttggttgaaactcaggtttaaaagcacaaacaaacacacacctcccgttggtcagcactggaggttgctagagcaccaactccttactctaaggcttgataagtaagagaaaagaatcacgtgcttatcctttttttcctatacaaaacttatttcagggagaccaaatagttgatgaaggaaagttattttttacatatagaaggattctagctaaaaaatgcagaaggaggccaggcgcggtggctcacgcctgtaaccccagcactttgggaggccaaggagggtggatcacgaggtcaggagttcaagaccagcctgaccaacatggtgaaacaccatctctactaaaaatacaaaaatgagccaggcatggtaacacgcatctcagctactcaggaggctggggcaggagaatcacttgaaccccggaggtggaggttgcagtgagccaagatcatgccactgcactccagcctgggtgacagagtgagactccatctcaaaaaaaaaaaaaaaaaagagcagaaggaatgacagagttcaaaaatcaccattgtgaacctttaataaaacatggatcttagcaacagtcatcagagggtgagaaagtgctcagaggatggcagttggggaactgtgtgaccgaggtcctgggccgacgccagcagagctcagcaagaatggcccagccagactctgggcctcactatatgacagcctagacttacgtgtaccccggacggcrtgcatgcctaaaaaacctaacctgagtctaatcgaggctttagctctgccagcctacaggaggcacaggggagtgacccgatttctccaacctgttagtgccctgaagaaaagggaacaggagtggttgttccagagtcaaatgatctgggaggcctgacacccagaggcagtgtttcagcatcctggggatccagatgcagacagactggagaaaacgtggatgtagactctctgttggatgatactcaggaattctgttcgttttgttaggaatggtgatggcatggtggtctttaaagaacagtgtcctggatgcctactgaggtattgatggtgacataacgtagtgtcgtcagggattcattttaaatatccagcaaaactgcaggggtgggaggagaggaaaccagcttgtccattgtgcacagcattgacactgggtgacgggaacacgtggattcattccactgttctctctgctttggggtatgtttgaagatttctgtaataaaaagaaaagaagtccgtgtggtgaaatgtgttaatgctcagggcgtcagtgtgcaggtttctgatggctgagcagtgagcagattgtggttgcggctcttagaagccacccagatttactgcagggtgtgtggtccccttctcagcagggggtgtctgggttgggtcccacatgcagagcagggtgactgcagccccggggaaggcaggcggcagagcgcagcccttctgtccagcagcttaggtgacctgccacttctgctgccaggaatagggcgtgacaggggatgtggttttcagaatagagattctggtatctctggaaaactcataccttttctattgtcctttccttcagaggaagtggcttttaggaagaagaggctgtgcattaaatttattccackggattcaacggaagctgcgatttgtgacattcggatcatgggccggaccaagcaggccccgcctcagtacacgtttattgggtgagtcttaataacaggactgtcagctgcttctcttccctgagagcactcaggccactccaggcaatgaggtccaagagatttccatgcagccccmcaggctctcagccatgggcctctgtcagcccagtgctcctcgctgcccttcctgctcagctgcggtctctctgagcctcggctcgcactgctgactccaccttagggcctttcctcccctgcccttctgcgcattcagccttgaagctcctctgggtccttccccgacaccctgtgatgccactggcctcagctcttcacactcgttattcaccctaggaaaggtcacagggacctattttgtaccacggggccaaggccactggatgtggatataagtgaggcaaaggccgtgctgtcacagagctgatgttctaaaagggacagacgagcaataaacaagaaaataaatgagataattccagacagtgaagaaagtgaaacacaatgatggagtgggggcctcttccgtgagggggtcaggaaggtgacacttgagcagagacctgaatgtcaggaaaccagccatgcacagatgtgaaggcatagtctttgaggcagagcagaagcagaaggagagaagtgggaatgagcatggcacgttctgggagcagaacacagccctgtgcagctggaagagccagggacaatgttgggacaagggcgagggttggcaggacctcctaggacatggcctggagtttattccaagcacgctagaaagtcagtggagggctccaagtcaggaagaaacataaatattacacagctgcatgataattccccagtaagcagagaactgctgaggcctgggcccgtttgtgtcttgttcctccagcagcctcagcactgagcatgggcctggctctgttgcagctccataaatacttactacagtgaaatcccagggtttcacttagggctctgttgattgtaagtgacaggaaacccaacccagtttggcttgagcaaaaggaataatttattggctggcatcacagaggagttggggaggcaggactggcatgcctggaagcggaagcttgaaggccggcactgggttctggtttccctgtctccccctggctccggtgctgggctctgttctgacatgtttccccctcgaggaggcctggtgctacagtagctccacctgcttttcatccaggttcaagtccagaggccaagagcaagtttgtgttcctgacagttcaaaagaagttctagaatttagtctcattggtcttgattgatctaggtagggtcatgtgcaccctgggcttgtcactgttttctggaaaattcttccattgaccaggcctgagcaggaagtaggatcagctccattggaactcaaggacaaaccacgactggtgctgctcctaaaatatggaggggcagtcaaaagtcagaaagggggtgagtggatgccagctgtccagaaggaaatagatgttcactgtcttcagtcaactgaaatccaggtgtgcactttactcggtgtggcagatggtttacagccccctcagccatgtgcgtcttccctggccagggctggcaggggccatgtgtttccctgtgggctcccagaggcaccctgtcctcctcggcttctgaggccagcctcctggctcaggcctgtactctgctttactcttgttcatttgagcccagagccgcctttgtatcagccagggcctttctgatagcctagacccggtgagacagcagatgagccctcgtggcatttgcttgaagcatgcagggagcaggtaccacagaaatgcagagtttcacctcggtgggtgttcagctctggcatctgaatgctctgtgtcaagatcatgtggttaagaaggactctgtgatcattcccttcctacacactcaaaaatcccgttttgcaacacggtttacactaattatktaaacaggactacaggagtaggaaatagttagaataaacatacttcaggcacctcagaagcacccatttacatacaaatggcagaaaccagcaatttagtaatgaacttttaaatctaatttcagttgctatgtgtatctttaactacaaactatcctgttgtaaaaagattccatttttaaccaatttaaaaattttaaggaatagatatgtaccagtatgtaccttgataaaaccaaaggcttttttcctttatgtcactttggaaatattgctatagttttatttcatcttggggcaacagttcttttccagaggaagacaattccagtgttatttttaagcaaggaaagagaattcagtattcagaactctaagtcacttattcttaaaagcgggcacagttctacatgttactttgcaagggtttgggattgtcagttggggaagatagaaacctcacattgcaaacagcacctccaaagcctggcagctggaggccacggcccagaggtggagaaatcagtgcagttcattggaatcactcatctaagaagacaggattgtggttttacatggttcctggggtgttctgagaagcttattaggggttcccacagaataagtcattttccattttttgaagagattatattcctctacatcaggtcccaaagatgcagttctgtgggcaactgggaagttggaaactgaatatggtgaaaatgatcccgtcactattcctaggagcgtggctgtctcctcagcactcacgagtgtgtggtgtagtagggggcggggctgtggtgactgcgagggaggtcacaggagagcttatgcggcgtctgggaggccccttggtgtccactcctagttgtgtggttcatggggcctcgagttttgtagtttgaagatgactccsaaactgaccctgagaatgagtccaacggcaggtgacacccagctgcaagaggctgtatcctgagattggagtgtgttatagagtagggggctaattcttctcatggttaaaaaccagcatctccctatctgtctctcctaattgcacaaaggacttgatgtggattatcacgtcacactccacaaggaaatggcaaaacaaaaagaagtttggagaagcaaggaaagtaccagttggagtaggaaggcaagcttgggaagggtgatgcaggcggccttgtcccgaaggcctgcctagatggaacgggtcaccctcgtgtgaactatgacacccagagcacaaaggagacggtggaacccatttcacgtggagggcaagaattgattccctggtgtttgaggccatgactcttttaaatgaattggtttgctttgtcactcaggtaaatgctttgtgctaaccagagccatgaagatttctcttttttcctaaagggaactgaacagcatggggatctggtatcgaatgggcagagtaccaagaaatcatgactcatctcaacccacaacgccttcccagtcatcagctgcctccaccccagcccccaaccttcccaggtgaggccttgtcggggtgtcttgcrttgtcctgtggtcttaggtccctgcacaacattttagaacaccaccacttagtgtctgctgaaatactgcaaagtacagctgaataatygtagaagcaatatatctttagaggagatttttaaaaatccacttggaaatctttgcattacatgaatgcaaaggccattctatagtctattttgtgcgtgttctgcaggcttctaaaattgcagattatgcaacttaaaattggctccctattcaaaagagctgctagctacacacagacacgtgctgtatagccatggggttgggatcactggccttaaggtcaaattccttctctgtcttggccagcaactcatttgaaacccaggagggtaggtgarttcttatattcttcattttcatataatttctttttccaatgagctataaagtaagaaatgggtagtttgggtatgagagaatagtgaggagtttttcaggaaatgctagttttaacaattgtctccgcaaagaaacttgggtgagccaactgtttgctctgcaactgatttcagtcataacagaggtagtaacagtctctacactttctgcaaaaagaatcctgtcaaataaaaatcctgtgcatcactaggagtaaactaagggcaaggaacaaacagcactgatggattaagcttgagaaagggattgcaaaagtaaataaaacaagaacggtgaggcagcaacacttagggattgacataacgtaaatgagaatggatctccaagcttccacgtgggtgaatagagatgaacaaaatctgtcaggaaccggacagaagagtcaccagtaggtcttcctgggccatccacaatacagcctgccctccgggacataccaccagctctctgtactctgttcctctgtgccaagcctccgtctcacttggaagaatgtgctgtaatgaggctccaaagccctgaggactctgtcctctgggacatccccctataaagacaatctggtccttctcatgacagtttcacaaaccaagagtggtatttaaacttaactacccctggaattgcctgaaactttagaagtagttttcagtttcatttggcataaaaagataggaatctctaataagcctcccagagttgcagggtgaacagttgagtctctgttgggttcaagagtgtgaggttcgcactgcccatcagcacttgttcctcacttctgagccagagcgctgtcagctccgccctggagggcactgctgagggtcactgtctcctgtgctcaaggctatatcaggtgtgtcacctgtgctggggagtcagctaagtccatcacctgtgtgtcggggtcctccatcacctgtgctgaggcccatcacttgtacttggagcagctcaagtgtgggctccttgcagaggctggaaagcccccacaggagcagttgccctgaagttgttacagctgctccctgctgacatcatgtggtctagaagggcccagaaatgggcaccacctcaggcaggttttgactttctgtggttaaagaaagaacaccagttctctcakataaagcagagagagctctcagaagcctgctggtgactgtgagagcaaagtcacttgcacctgaagcaagacagccgagaacaccgagccaccggcagcctggtgggtttggagggtagtgcgtcagaaccagatgtttataaggcttatgtattttatcacctctgctgtacagtttatggtttacaatggctgcaaggaaatcggatcagttttgttttacttgccaaataaaacaaatgtcaaaatagtcaatataaaatgtattctaatttggctgagttaagtcagccaatatgcaacaggataattgaatgttcattartgcttccaagtaaaagccatttgtctgtcccaagttctcctgtgcggtaatttacaggtaggatgcacacctatgtaagcctcatccatcagggttttttggtttttgtggggtttttttgtgtgttgttttcctatccagtatctttgatttattttaaaatgaaatgttgattattcattcaaattttccattgaagacctaggaaaggatgagtatgctgttttattccttgaggcttcaggtctctacactctccagaggaggaatctgatcacctcccctctggtggggagcagtggctggggcttgtgctccgagtgctgggggtctaccaggagcctatagggtaaggcaggcccctcagtggggcctgcagggctgcacaccagctccgggatttcctgtcttccctttcccagccagagccccagacattaagctgcgctggcagcctcctcctcccctggcttctgcgcctttgctcccggtgctccctgcacatgaggtgtgtttgacaggtctcagcgcagaggacttctctcccgggaagccctcccagaggctcctgggctgggcctgtgctgggtcttcttctgtgagcgcttccggggcatctcgagcccgtgtggtggtgagggcatgtggtgagcctccgaggagctccccagcgcctgcctgaatccaggcacgaattcagtttcaccataaatgcgtccctggcaacccctccagactactccctggtccctgagcactgcgcgggtcttttcctatggcgagagtaatccaggcttgtagaaaattggcagaatgtagaaagtatgaaaaaacaggaattccatttcccacgagcagatgcttataaccttttgttatatttccctcaagtctttttcttgtgtactttttacataggtgatatcatatcgtgtaatagcaagtctgcatcttgctactcttttctcaggtagccttaaccataaacctgagaaccacgtccagtgcggtctttgtgtggcgtggatcgggcctctgggagcgcggtgacgcagcgccctctactgcccagccgtggcggtggcggggaatgcggttctgagccggagctagtggcaggctctttcgccgcagagccctggcccaggccagccaggaggacctaggaagsggtgggtcacagatcttgctgccttcttgagtctgtattcctctccaaagccaaaaccatgtgctccgcctccatttcttgtgtcatcgctcagatttcaaagaatttcctgccattttttggaatgccgttcattcccagctttacttcagacaaaggtggatctttgcaccgtctgtaggccatcacctgaggacctcgtggttctagcagcactgccttctctgtccaaaagcaggaactgcctctagaagcaggagcttcccgcagaagctccgttattgcagaaaatgctgtggtgtcaccggctttggagttgtccttttggagcaggcaggtccccagggagagggatgctcctgggctgtatccagtgagttggtggctaaggtggtagaaggtagcttggcagagctcctctccctcatacagtgatgcttcatctcacatacagacatcgccacacacatctcttgactgtcttctagtgaagaagggcagccacttcttctgggacccagagcctctccatatctctggccgcaggcgctccatcccctgcctgcctatgtcatgcacgtcgatcaacaggagagagctggcctggggacggaggcacagtcccatctctgtggccctctttggggctgggcccagctttgtgagtcagccttgggcatgtgatcagatggtggggtttctgattcagctctgtgatgctgtctggggcagggggccaagagaggaaacaccttcctggcctctatcagagcagcccctccaccgtctgtcacatgcagggcgtcacctgtttctgctgggaagaagaggttccgctgctgctgggacagaggttgggaagagccccaggaggcaggtgggctcacaaccgctggagcaccagaagtccccagtgtgataagggaatggctctgtgtcgacccaggaggagtcccctggtgggctgcagccctctagctcagcaagcagcagaaccatggcttgataaagacatcagaggcatgcttatcaaatttgcagatgatgcagagtcattagggtgagctgacgtgctgaatgatagaatcaatactctgcatctcctctacagccagaacaacctgctggagccatgggaggcgatgggcgcaggcggagagggcccccgaggttcaaaaatccatcacacaggagccaaactgaggcctggcttagcagctaagtgtgtgaaatggcgggggtcggagcgtgggtgtgtggagtacagcctggtgtgcacagcgggaggccctgagtggagtcctgctcctggggcgtgtgcactgcctcacaccaccaggcagaggttacccaaatccagtgtcaagtttgaggaatccagtttggagctgagtagagacaggccagcctgctgcagatgtcttaagggtcaatggcaggagagaaagtagaagtgtttccaggtggggatggaggggtggagagatggctgggggctccagaaggcagaattaggtcaggtggactgaagttacaaggagatagatttaggcttaacactttaaaaaaatcagtaaagacagcttccccaaggtgaaaattctgtggcatcaagaagctgacctgaggggtgatgcgctcccagatgctaggggtggtcagacggcatttggatccttcagactgcaggagaactagagcaatcagtgtttcttaagccgtatttaaggaacttgtcatattccctctccccacctacagaaattcaggttcggcagaactacgtgttagggtcacagacaccttgtccagagaacttcagggccctgcagtgggcagggagggcacagagcagtgggccttggtttcagaggtcctcaagccgccgtcgatgctgcttctgtatctgacttgcagccattgccttcctccactcaccagtgccgaggtcagaggaggaggcatggatagtggagagttgctgctgtgcagcctccctgagagggaaggctcagaggggcctcccacaacgtccggggccctcccttggtgatgcggacaccgtgtctccgtccagggtaggcaggcatgagctgacgatgggtggtattctgtccctttcagagtctgtcagaaacatgtagtctggcctccagctggctaggattttcgggacatctcatgtttatgtgaacatccatcctgcgggggctctcctagaaaatctgcaatgtgtggttccagtagcctcaccccacccttcctgctgacctgggctgtcctcaccatggtcctgagggagaagctgctgcccaaactctcctccccacagaccccaggccatgggcacatcctgtgacctttccctaacactgtctctcttgggggaaagggttattttcccacccgaagtcacagagcatttcccagccattgagttctgaccggcagcctcccctgcaagatgcagctcccaggagcctcttggagtgtcagccaggcctgggttgcccgtaggaggtgacgtgttgctcgctattgcagtcatcttcctgtaatttgtcagctcccagcaagttgtcagtcacaggttcggaagtatgtttcttagtgacagacataattgtacttaactttttgcatggatgttatcaatctgtgacagatactctgggaaatggggcattttgattgcagaagatctgtcacatgcatttagtcttcctctcagggacaccaggattcagtcacaacttttgcatgtcgatgtcaggttttgagaacatagatccttgctgacctcaaaaatcgttccatcactctgatcccagggctgtcatcggaaaggttaatggcccttcctagaggagaggaaaaatcatgccgtggtgatctagaattcaggccgtgctgcccaggcttgtcccccatcacatcattgtcagaagcccatgagcgtgccacgctccgtcctggcctctccaaccccgccttccctctggacatggggatcaactccattactttctgattaactcgcagagtaagtcagcagttggggcggagccttaggtcactggctggagccttgttgtccacactgacagcctcaaatccttcggctgccttctgtccgttttcaattgtaagatggcccttgtaccccagatgacatgtcacctgtcctgttgttgcaggacttgaacgaaaggcccagaatcccacagatcagggaggctgagttttccttttcctgttgaggtgtttacctacctgttcagagtggcaaaaggcttggtgctggaggcatttgcctgtgagaagtttctccctagggttcagtaggggaaggctcagtgcagaggattggagttgaaatctgtggtttcatgtaaggtgcatcatttatgagaggggttctgtgtatcccaggtgattccaatgactctttttgtcccctagtaataaattgtgacatggattttgagctccacttccatagtggcaagaaatggtttgggggcaggtgagctaagcaatggagcactctgtcctggtcccatcaaaagagggcttggggcgctgggtgtggtggctcatgcctgtaatcctagcactttgggaggctgagacgggaggatcacttgagttcaggagttcaaaacaagtctgtgcaacatggcaaaaccccgtctctacaaaaaaatcaaatacaaaaattagctgggtgtggtggcacaagcctgtggtcctagctactcaggaggctgagtgagaggatcacttgagcccggaaatcaaggctgcagtgagctgtgatcatgattcctccattgcattccagcctgggcgacagtgcaagaccctatcttaaaaaaaaaatggaagaagaagacgagggcttgggccctggttttctggcttgggggccttcagacacttctgcaggtcatgtccaggcataactatgggtctggcttcacttggaaaaattagatttcctcttccttcacactaaagccacacatgctttttgtttgttttacctctaaagacagaacatacattttcattgtcttttaagatgaagactgtagcgcagggttctttacacaaggagcacggacrtcagcacgggggtgtgaatgatcccgctgcgcaagtggcaccttccagccgaaaggaccagcagccagccctgtctcagagacgagccctctggaggggtcgaacctgaacactaaatcaaagatggatctggggtgggcttctggggctcaggtattgtttctgtaaatagcctgcatttacattctttgcctgtaaccttaaagtctgtggtgacctgataactgcactggggttttcagacacacatatgttcctttttcctcaatcsagaacttcactggcttcctgttatccraccgccccccacacatcctcttacattaattaggtgagtctcctcttggctccggggcacaccattcttattccaaaagcatctctgctctggccttcaccatgcacctcagtttgtaccagccccttccctcctggaagagttaggctggactccagaatgcttaggattggccctggccagccccaccccaggcctatagtagcccacatcactgctagaaagcctggcctgcgtcgttttccttcttctcctccagttgcctgcgtcatacagcctggcatctcacagttccctgtcattgctgcgtgtatttctgtttgatcttactgactagatttgctgcttactgatgacagagatcctcatgttttcctttttctcctttaaagcctcaaaagaggctagtcacacagaaatagcaatgatgatcatattgcatcaccgttcatcaaatttgagcaagtactttcaaccatgtcatctcattccatgctcacagtaagtgctcagtggaaaatgtgtggccccaagatggtaaagaactctgaattccaggtggctgacatgtgttaggcacccagaaagtatttattggatgcagaaagtgagttagtttaatacataggactggacatcatattttatgcatcgcccttccatccgtccatccatccagcagagacttatcatgcatttattaggtgtgaggtactgttcaaaggctttacaaataactcctttaaatctttttttttttttttttttttttgagacagagtctcactgtcgcccaggctggagtgcagtgctgctatctcggctcactgcaacctctgcctcctgggttcaagcagttctcccacctcagcctcccaagtagctgggactacaaacatgtgccaccacgcctagctaattttttgtatttttagtagagatggggtttcaccatattggccaggctggtctcgaactcctgacctcaagtgatccgcctgcctcgacctcccaaagtgctaggactacaggcgtgagccaccacacccggccaactcgtttaattctaataatagctctgtgagtcagttactattatcagcccaggtttaagttgaggaaactgagggtgaggaggttaaatcccttgcccaaggtcatacagttagcaagtgtcagggctaggatctgcacccaagcaggcaagctactgttagtgtgcagactgtcacgaggtccccagccgtgaagcctctcatcagggagccaagcatgtgcctggaagggctggtgggtaggtggggtgcccattcaggtggccccgccatcttcctgtgcagcttctccaggctcctgaccagcaactggtgaatgaggacttcccagggcgtgtgggtggggaactcatcccacagaggcccctctggtcagaaaccgcctaagcggtcttagggagacgtgtgaactttggccggtgtccagcacacttgcactgtggtcgccgactgagggaacatgtggaggccagcccaggaggtcccagcaccaccatccctccctcgctttgaagcgggcgtttaagcagggttatgagcagtgtggttgattctggtgatcgtgagagtggcatgaaagagacctacagagcgaggttatttgaatatcttcaaaatgctcgtgaacagagcggcggccgctcttggacccgtatcaaacttagttttggtgtcagagtaattttgaaggggaaatttcattagaatgcagttcggtattgttagatatgaatgatgagtttaggctgagcaatacactttttgatattaatttttaatacagcttcttgggaagtcagagcttctatttaatgaagaattgacgattcgtcagttcagctcccgcttcggagctggccttggcgttcgcagtctcatgtcagatttttgacaaggtatttgctgcttgtaaatgtgttatctttgtaattttggtgaatttctgagtgtcttatttttctcagtggtcatggtggttatgtttgcttttttgttgttatcgtcccgagaagcagggttagaaatgggaaattattcccttctgagtccagctcgcgagtgcacgagggctctttgtgcagttggtttcagcgccagggttttgagaaaggcttttttcaggattatgaaaatagttttctgtgtgtcagaacagatttatcagttcactttagggtcggttttgtgaaccagaccatttagagaaggatattttaccttttatcagagtggaagctgacagtctatttgcaggtagctctgtggaatgtttcacctgggtctctcagtgtaaatctagctgccaaataaagtaaaaatgggcgttaaaccagcgatatttcccaggattttactaccaccccctaccccccgccccaactatgctgctctatttcgatgcagagtttcaattattaattgggatatttaataaaatcctttgcttgcagttacttttaaaaggccttttgagtttatttgggttcagtttttgccagtgggtagggtagaattcaatctgaatatccttcatgagcagcagatgttttgtttccagttgaataataatattaataattattattattagaataaatacaattattattatcatcattattatttcagctgtaattttctgggcttcttgtgccaggcattgtgtaaacgttatatatatatgtacacacctacacacacagagatagatatatatgtagttttaatctttataaccatgttgtgaggtgaataattgtgtcctcattttattttgttttggttttgtggggggtttttttttttgagacgaastcttgctctgtcacccaggctggcgtgttgagaagactgaagcttggagagatcatgattcatccaagggcagagagttaggatttagaggggctgtgagcagaggagaggtctcaccataatgccctgcctgccttcaaggagcctcagggcttcctgatggaacgctgaccctctgctgtgagctcgaccttgcatgggaccaaaaatcaccgtccagcctgtagcccacattccacctcctcttcagtcatggctgtattttgttaaacaaattgttttccacagcttttgagatggattgggcagggaggagacaagtgttgcctttggctctttgatagaggatgtgctgcattcagtccagactgcagcttgccctgcgctctcacgcacacagtcctttatgaatctgactttggcagtcccccgactcttgaattttcgaaaagcggatgttttagtaggctggaagaagatgaaaagctagcagtgcccatatgttccttgtttttaaaagtaaggtcagcgaggtttagagactctttaaatatttcagtttataagattagactagatcatctggaatggaagtgtggtgcccctggtcccagacttggcttttttcttcatttcttttatatgggaggtcggtgttttggcattgcaaggttcaagtgtaataaaacttaaatgtagtgaataaataccatgatttggagtgttgctgtggctatgaaagttagtttcctttcttcatctttttttttttattaagtaatcagtgacttgaaaaatagcagattggtataaggattgtaacttaagaaactgaaaactcccatgctttaaaggagtataggctttgatatttttctgcggaagcattttcttcactcatttaaatcttcctaggctgagattaagcattcatcctgaaatgtacacttgaatagtttgaaattcaacacaagtgtatatttttagtgaagacattttctcttgggttatcagtggtcagtgatgtagtggtggttttgcttgaccccagggtatttacagaagcctaggatctgagcaaatatctagcccaaccccaagttgggactaggtctcacttattggtacagcacacctaatgttttatgcctttcacccaaaaagcgtttttacggccaggatgtgcccgtagtcaccaacagtaactgctgggagacacgtcagggagaggtagctgtggtcactgccttgtacaacagccaaaagcccaaagcaggagggaccctggccttctcccagcacacaacgagtgggagctctgtgtgctggccggcatttcctgtcacgttcaataggacacgttcactcttcatacttcttcaattctaaatttcagaagtaatttgtcactttagaggagggcgtcattaataaccattatttagaactgtcgagtcttcctctctgtgagtgtctgagttaagcatccccaaaattggccttgttggtggcaagcagtgcccccacactgacagattgagactaccccacccccaccgacgccctcacaacccagttcttccccgtctgcctttaatcaccgcgaggggggcgacagggaatggctacggcatgtcctcctggaattcattagcgttattaccaaagaccgtgttgtaaattgagattttttttaactgctaggaaaaaatttctccttaactatttcattttattgtacttaaaaaaaagaaagaaagatttttctcatcaaacttttggagcagaatggttcagaaacctgacttcagatcccactgggtgtggaccctgaattgtaaatgaagctgaaatcgcatctggttacccttgagctctggggagagggccaaggaagaacccccaaaccttccgatgggtggttaagaaaaagaattgccattcaatgtatgttaatgcacattgttattctttaacattaaaattccactaaagtactaataattactgttaatatctttcggtggaaacttacagtaaaggagcagtagtggaaacagtatttaagggcgagctgccggcatgataagaatgcaaataagcgttattagcctaatgattttgccgtcgccatggttgtgcggcagcagtgttgtgaatatgtcatccggcacccgtgaatttggaaagtgtgtcaaaacacaacttcaattagtttgctctaattatggctctggagagtttgtaactacatcactcctcattaaaagagattttcttatatggattaatgtaatatacaaaggaaagtttcaaagttcccgatgccattcgctccccccacgcaggcctgatggatccggatccggggtctgtgcctgcagtgggcccaggcagggggctggggcggctccctccttctgcctggcgatccacttcctgctgaaagtggccactgcaaatggagccttttccacaagagggtaagtgaacccgtcacaggcttttaaggagagatggctaacctgaaactatcaggatgtccctccttttcrgcttctcggtggaggctggaagcagaaaggtctctggacctaccgtggtccagtcccatgtgtgcactcagcccttggccgtgtcctgagtccttcggggagattatgtggcaaaatgtgttgtttttggtcacgtagaatcacatagtatctatgaaatgttagtaaaagtcttttcagatagcaaaggcgtacattaaggaacgtaatcaccaagctgatgtatagttctaaatgctatcattgagccttggccatcttgaaagaagaaagagttcacatttttttgtcctgttgcaaacattcccctccccaaggacacctgtcccgcagcgcccaccttctcgagtcctactctgcggggtttggatggccaccttgtcaccttgcctcaaatcggccttgtgggactgttccttgagctttgctgcccccacctccaccattctgctgagcccctggccacaacggcatcgtgacttccattgtggggggggrmtcagtaatgcattttgaacccaagagttaaattttagaatgctgattgaagaggcctgggttttggttttcctttgatttagccacacggtgcagatgatccaaaatacagccttgaaaacatttttgtgggcctttgcgtgttctctttgtcatcacttttggtgagtaactckgtgtgtgtgtgtgtgtgtgtgtgtgtgtgtgtgtgtgtgtgtgtgtcccttgggccttctttacaccactcacaggcggtgttactttgagtgagttttatcactctctgagcctgtttcttcctctgtgaaatggggatagaaatgcctcctttgcaggatttgtcatgagaattaaatggggggggacacagaaagcaccaccctggtgcccagtgagcacccatgcatgctggctttctgtctgtgtccagggttcaatgcagaacttagcctaagcatgagcagggcatccccttagacctttcctttgccaccacgtggctcccgcctgctgcagttgcaactccagtcaccagcacccctccagcaccccacagcatcagagactgggcacaggcaacctcccctgcggagctgggactagaatggctgtgttcacaggtgagcagctgggaaggggttaagatagtaattgtgtaagtcttccaggctwtctcccagttctgcgataatttgatgaagaacttcaccctaattaaatattcaaattaggaataagtgtcaatatggcttcccattgcctggaatgatgattaattgtattcaaaactctagtggcccactgtaatctaaacctaaccgttgttcttgattatttctgcaccacacttgccatgtttttgttttaagatttaaactagtaattgatttgccatatgccgtcaagctgcacgtactttatgcatttaggaacttggggagtttggaattgtgatttccttcatcttccagtggcagcttttttttccccttgtccaatgcacagtgatttggttttgtgtgtgtgtgtgtgtgtgtgtgtgtgtgcacgcrtgcacgcgcatgcatgcatgtgtgtatgtgttgcccatgaggaaaacccattctacagtcagcctggtaggttggagttgcattggtcgtggcaaatgggcttcctgaatggaaaatgaacaggtctgtgtttgcacttactttgtgccctgtgtcatctcagtaaagcaacatggcatggtggaaagagcatgaacgcacatcctagcccagccattttcttcagctgtgtgactttgggtgagttacttaacctctctgaaccacttttcccccacatatagggtactacttcccttgctgggttgtttacattagagatgtgtatgaacatgaggaatggtgcaagtgcccagtgagtagtaactgccatagtcctaaataattacaggagtgaaaattccaggaacaaagccttcacgcgggcctccctggaaagcccctcccagccatgcaagtcaaatcccatttcctacctctctgactcccggagcctccgttgcccatccttggctttgtgacatctcttgggccactgtctagactcttgaattactatttcattgctcgggcctcttctccccagccacagtcttttctttttgcaggtgggaccatggctcccatgtccctggatacctcccagggcctaacagagtgcctggcctgtagtagactctcaacagatgtttgttattttggttatttctttttttttttttttttgagatggagtcttactctgtcacccaggctggagtgcaatggcgtgatctctgcttactgcagcctccacctcccaggttcaagcaattctcctgcctcagcctcctgagtagctgggattacaggcacacgccaccacgcccggctaatttttatattttttagtagaaacggggtttcaccatgttgttcaggctggtcttgaactcctgacctcgtgatccacccgccttggcctcccaaagtgctgtgattacaggcatgagccaccacacccagttatttctttttcatgccactgttttaaaattgaagcatataaccatattgtcctttatggcctatcttttgatattcagagcttttactttgtgatataggagatttatgttcgtgtttcagttgacttatggataaattcctaaaggggaagatacacgtttcatttggtttcttaaactgtctcggtgccaggcagtgcctagcacacagtaggagcacaataaaaaaagtgcgctgagtcagtcgccacatcctaattatagcggccttgtgtgcctgttgatactggtccagctcccctggcatgggcctgtgttcactgggtaatacttggaattaagttttaggtctgggcatagaaggtttataagatagtgaatataactgtagaggaaataggtctcttttaagttttacaaaaccttacttgtcttggcttgtgtcaattacaaaacgaaacaaaaaagagactcatcagaccgtgacaaatgatagtaaactttgcgcatggtggtttctccctgaggttggctccaaaatcaatatgaaaagaaaaccacaactgaaaatattttagagcctagagtgattaaaataactgactttctgttttagcggaaacaagttacaagaaagaattacaatatctcctcacatctctgggtcttcacagatctcaatcgtaattcagagcctcacttgggaaacacaggggacttggagcaggaatcctggctgtgaagtcattgaggaggattcgagtgttagtcaggcccttccagctgaaaatgattcattttaattaccttccagggtgatccgatacctgagcatatggtctttaagaaataaggttccccaaactgtcagcaagtgtgggcaatggtcagggacctctttctgacaccattgaccagccttggagagcgggcgctctagaaggtgcttattaaaatgccagcaggtgcagcaaaggtccccttctctgtgactyccgcaccctgcttgygccaggtgttttataagagcctttttcttcattaaatggcattcattaagcacgtccttacacctggcacagaagctgtgcgtcacagatgacttcttcccagtggtgtttgcaggaataatgtggaatttcatttagccatttgctgtgttcttcttccccttcctatcttaacttgatttttgttgcttttcatatttcttctgctgcccccacaatccattcctctcctttgtacatgacctctggtctttgtccaccagcagacacattatatagaaaacaaggtgtcccttcagcaccaagcaccaccacgctggatgctttcatacgtgtgtctcttctactctcccaaccacattgagaagtgttcccctagtttttgccatctttttttctgattaaaagaawtaatttctcatccaaaaaaattaacacttaaaacatatggaagagcagtggggagaatccacactcccatcttagaggcttctgtcgtcaataccgtgagcctctcctgcccctcagtcacctctaagttactccctccagccctttgctgtactgtagcttagccgtgtgtgcccatggaaaaaagattgtcttatgggattgtttataatacatcattctgcaactttgtttttgcttggctggttttttggttttgttttacttaacagccagtctttgggagttgggcatttctacagaaaaatctctggctctcttcatctattcgttctgtcctactttagtattatatgaaaattccacattttattagcctcctcttattgatggtcattgggctgctcccagttcattgccatgacaaatgctgccccaaggccctggttcctgtcctttccttccacagctgagatcatattccatacacagatcccgagcatctcactccaaccctctccacaaagcctgtaaacatcattttatgtctgcataatattctgagtcagacatwgtaacattatttccagtttttgagtagaccgtcataattaagagcatgaattgtgtaattggccccatcagcattcaaatccaagcttctgcatactctgtgttcaagtccaagctgtatccagcagagaggcaagctgtggagcctctctgagacacctgtggagtagggggggtctcagcaactcgccgtaggattgggttagggatcataagatgcatatgacaggtacacgctgtaaacaagtcaactgatgatatttttaaattttcttaaataggtcatttcccacatttcaggttctttcctcaaatctcaaaaagggaagartaaatgctggtccttttgtcgcattacttcccctttcttaagtattaaatttgaatcatctggaatgtattattaagtgtttctcctagagaaggtgacatgagtaatcttctgttgtcttcctgcacaaaagacaacttgaagtcatacaaaattgctgaatcacaactattttcaccttcaaaactggctgcgtcgtcttccagcatttagtatggcagaggaaaagtctgaagtcaccatcagtatttgccaggatgtatcctcttttcattgcattttctggaatcctgtgaaccccattggttgtgtgtgtgtgtgtgtgtgtgtgtgtgtgtgtgtgtgtgcgtgtataagggttgggagatcaaagtggcaggtgcctctgactatgagtgcgcctctgccttgctagtcaccactctctcgacgctgccctttgacagtctgggaggacagcaggcactgcagctgcctgggcagaaccgtcttcattatatgtggccactgggtctacaagattaatggtaacattttaaaaattcacacagacctggaatcagcactagaaaatacagatttaaattaacaaggaaaaagcagaatcccatcaaaggaaataaatcgtgctggcaactattgtctcataataaaatatattctataactgaagggcttttatatggagctgtctgcagcttagtggccatgttaattgaataaggtgcctaagactgacttgggggaaaaaatgaaattcccctcagcatgtatttagctggagccgtcatcgctggcagtgcgtgcttgctgacctgtttgttacagaacagccaatccctcctgcagagagacgtgatggccaccagaagcagcagggtgagagccctgtctcctccgggcagttccgtgggcagggggaaggggaggatagcttggtaacactcccggaggatttagggactgttccagttacaattctccagtgaccaaacagattttggaataataatccatcatttgagtcaagtggcagacatggttgtcctctgatggacagcccttgctccaggggtccaagacctactggggaaggtgccagaaggccttcacctcctggcactatcctaagtagagacagtttctcgagcctttgagtctccttctcctcagtctgctggggagctttatgaactctcctaaaatctaaactcatggatctgcctacagagtggtcaacttcgggcccactaaaatgactccactgaaactgctgtccataagtgcaccagccaccatcattctcgtggacctctcaggtttttttttttaatttttatctatttatttattttgagactggattataaaactggctaatttttgtttgtttgtttgtttgttttttggtagagacggggtttcaccatgatgcccaggctggtctcaaactcctgggttcaagtgacccactcgcctcggccttccaaagtcctgggattataggcatgagcccccactcccagccggcctctcggttttgtttgatgctgtcgagtacctactcattcttataactcccttggctgggagctgcagaagaggtgagtgtccaatgccagtggcctagtgcagctcctgatctcttgcttcctccctcctccaggtacagggtcgtgatcggggccttccttcagtctctccttggacaatycaacctgtttattctcatgaaccagaggcctttgtatgggaaagaagccaaagagtattgggttaactgaccacgattccaagcatgaawataaggactttctgtctatggatgccagtccatagacactggatgctgtggtcataggcataggcactgaccaataaagagtcttctraaatattttaaaagacagccaaatatttcatgaaacagtggtaccacaattttttaaccagtcctccattgtttgattgttcatctgattctagtttttggctttataagtagtgccgtgatgaatttattgtttacgtaaaaatatcgtgaatcagaaatagttgcattttccaagccattaaccaacccagtcgtggggatgagaaggagagaagagagaaggcttcctggaagtttcccgaaactatccctaattataagtcagaatcagatcaacaagtagtaggtaatcttagaggattttccctaatatttgttaagcgctcactgtgtactgggcattgttctcgcccctggggatgtggtgggaagaaaaggtgtggtggagatcatgttctggtgacatgaaaacaagtcagacagcccgatagagtgggaagggcgccacagggaggaggcaggtgttataagagtgtggcggggtgcctcctcagaagggtggcctgactggggagggaagccagccgctgagatctggggacagtggcaagtgcaaaggccctaaggcaggaacaagagcagrggctggaggaacaaaagcggctactgaggttggcagacgtgaatgcagggagggtggacaagatgtggtcagagaggagggatgggccagagctggcagcacttctcagccgtgggcgggtttggatttcatcctgatgcagaggaaaggccccgtgggttctgctgtggtgctgcatggaggccctcatgagccagactctaaaataatgccggggtggcaagaatggggagagtgggagtaggattgaagctcrcgtacttgcatgtgctcacgcatgcctggttccgtgctgtcaaccctgcctgcatggtggccctctgtgccctgggaggcaacacacccctgccaaaggccatgtggctccctggtgctggcgctgggatttggacccacatccagcggactcgggggcactgccctcaaccactacaactggtttgcctccctgggtgtgcgatcgggccattggtcatccagctctgtatagttcactgtaacctgtcgggatcactgagctagtgagcggcagagatgtcatgtccctggcatcactgatttcaaaagggccttcaggagggaccctgtggccctgattgagtagtctcattttatatacccgatagtgaagctgaatcggggtaactctaacatagcgataaccacctccggaggacacatggactgacctcttcattaatacctagctttcccttcatcagctttacctctcagagcctcagtttcctattctgttaaatgagaataattactcctacctaaaaaggttgttgaggtgatgaggccgggtgatatattgaggacccccagcccaggtcctggcaggtggggctccaccccacgctggggaactggaatctcatctcgccagagacccagctgatggcagagccttcatccttgtctctcactttcaggctaatctgacaccaaagcactcctgggccacttctccttcggcaggtgacttgtcctgtttaaccacaggtaatctgtccctggggcccaaactgttcattctcattaatgggaagccttgatgtgcctttctgtcctgtccccatgtcccctgcttcctgtgtccaggagtagtggaagcagaaatgcaggggaagctatttgccatgtagggaggagcccttctccctaaagctttctctgcccagggggccttctcacctgctgctctctgactgctgtcccttacccactcttgcatcagctactttagctggagtattcagtaacctgatttcaattcagcagatccctactgagcagttattctgcagaaaatacagtcagcctgtgacttgaatcctcttttaatttcacatttgctgcatcaggcacacattgtctatcatatatgaacagaaaccttcttttttttcccttcttgtaaattcctggttgctgctgctgctgatttcttcttacccatacctggtttcctccataatggagagaggtgagattcagggtataaaacagagacccctggagcctaattaattgggaaaatacacacagggagaaatgaaatgatagagactaacagcagttcatgtcaaaaaagaaacccaggagttttagtgagccaactacaacacttgatttggtcaacaaatggtcagtaattgtctaccctgtgacaaaaaattgtcccagaaaatgaagtacaaaattgatgatatttggccctgctcttgaggaggtcacaatcacattagggaacaggtttatatcagatgaccaaagtgtactgtgatacctggagtggggtgagagaagacactcaggcatccaatccagtctggggcaagcccaggaaaggtttttccaaagagggcatggttgggtgggatcttgaagtatgaataggagtttggagagtcggtaaggaagaatggagattcctaggaagagggagtggcatggataaagaatcaggcctaggcatgagaaaaacaaggcctgttcagagattaacaagacttccactctttctggaggagaggggaagtaagtagtggcaagaggcagaatctggaaggtgggctggtgtgccggggatgtgtaagtgtacagagtgagaagacagctaagccagcacccttgcaaacagcaaccttgcaaagtttggagacgaagtgggagttggcggggtggggggtggtgggcagaaagaatcatctccaacgagggaagagaacctggggcgggggttgagttgcagagcaagccaggcaaaatctgaggccccgagggacaagaaagtttggtcccggacatcagtattgcatggagcagctgaagagctgggccccttgatttctctgttgttcatatacttttttgtggttgttattgctcatatatttcttttaagtcctaaatttccccaaaactatccatttagagggtctgtggcaagtcatgtcgacaggaatgaagtctctgcacaaagtagatagtgaataattgtaggctcatgatcatttcctgctaccattcccatccacattggcgccttagttttatttcctcactctcccacagacgggcaagcttttgaaattgtaaattggatgttggcacatttctgcttaaaaatcattccagagaaaggcagaacccatgctgggctccacgtggcctggccccaccgtcttcctggccttctaggcatggccaccctgrcttcctcctaagtctggaggaggtcagactccccacggagcctcgagtgctcacccctcctccctgctgcatctctctgatttctgcctatcttcagttcccacctcaatgtaccttcctccaggaagccttccagggagccttctcctaccctgcccttcctagcacttgagtcttcccgccttccataggaaatgatcacacttgtaagcaagtgttcaggtaactttatggatattttcgtgtccccctgcctgtcctgccaccactgagtcccccacagatctgtattgatgcatatttgaccacccaacagctcggctggccccattttctcctctgcctcctggctggcctctttgccatcatccatgtccacctggctcccaaagttctgctaatgctcctgcctcctctgtgagcctccctgaatgcttctagctcctggagtgtttaccgcactgcacaaatcgctctgcatccttagttaggttgcgtgcacctttttagggctttggaggcttagaaatcttagtctggcagccatgaagcaaaatacttccctggctcctggaaattccctcattggtatagtgagtgcagttatagcacctaccctggatccttttagtcacacacacaaagccctgtgctcagaagggccccaccatgggtttaatgctctgctgttgccatcttgaaattcttgatagcatttgaataaggaccccatgttttcaacacgcrctgggccgcgcatattgtgtagctgctcccatacctgcctcgaggggcgttgtgaggagccataggaggatgtgtgacacctgcattcccagggctggcacctggtgacactctcagcagggtcacctgtcatcattttagttctgctcaaccacaaccacagtcgataattcactcttctgtttgctcagcttcattgactaagtgctgtggtcagagacattgatcaactgctgaaaacccttctgcagctgctcctcaccctcgcagggttcccagacctggccagtcttcccagacctggccagtcttcagattcaccgctggagcttgttaaaaatagatttctgggctgcacccggccaggcccactgaatcagactccccaaggtcagggcctgtgaatctgtgttgtagcaagttcccaggtgactgacgccttcattaatgccatgatgggggtttaggaacctccatcctaggagtttgaacccaagcctcttgtaatggtgtttggcgccctttccatctggccctgcctgcatttctagctctgcttccgacgtgtgccctaaccctatggggaagtgctggctctctctgactccctggtgggtgcctttcactsccataacaccttgaggggtcctgaagccccgttccctttaacagaatatattgttccttcttttcatgcttaccagcactcagtttttcttgttctccgagcacatgtcacgttgcactgtgatttgtttctgctttattccctgcagcctgagctgagggagctcacctctgtacccttagttagcagcagtaacaaagaatattcaggttccctccatgcacgccagtgcacccggtggacacacttacagtgcatgtgtctgctggttccccaaagccctgagcgtacagttggtgcttgattcagcctggctgggctgtggctgagtgtccgccatgagctatcactctgtggctagcagacccaataccttcacagcccttggtgctcatcttgcccctggaaggctccttccggttccagctcaatcctggacctgtgggaacatcccctccctggagagcctttcctcccaggagtctttttttttttttttttgaggcagagttttgctctgttgcccatgctagagtgcaatgtgcaatggcatgaactcagctcactgcaacctccgcctcccaggttcaagcaattctcccgcctcagcttcccaagtagctgggattagtagagacagggtwtcaccatgttggccagactggtgtcaaacccccaacctcaggtgatctacccacctcggcctcccagagtgctgggattataagcgtgagccaccgcgcccggccctcccaggagtgtttatgcacagcagtcattctaggtcacacatgtgctgtgtgaaaaaggcacctagtaattgaccacttactttatgtgataagtgttccctccagcagtctcttccttttcggaaatgtccgggtgtggccacaggttaggctcctgagctattgcaacacagcccccagttgtcccaccaagaggttttgttgtttttttcccccagtcctgttgggttttaaatattttcctattcgcttaatttttcttttcagcattcactacaggcagctggtgaccatgccaaatggattgtttacttttgactaaatgctcacttaggctgagtgttctttgtgagctttaatgactcacacctgagccatcaaagactgtgctgtatctgtctggaaggtgctttcctgagcacctactgtgtgcgctgcctgagggggaacacacagacatagcagttgagagcgatgtgccatcctgattttcagaggtcattagtctcctgaactcatatggcaataataattcccaacacctttgtttacagagcgcttcatgtgcagtgatcctcagcagccctgcggtgtaggaatggaagcatttgcatggctcctggaataaaccaaggctggtgttcagcgcctgggttgttacggtcttgctggtgcattttgcccagtgggcagagatctggatcaaactgccaccccgtagagtcccttgggcccgctgtaaggcttgggacacactttcttcctcttggatgtcctttctagtatggaaaaaaaatgtggctgctgatgtctagaaacttccaaattccttgagaggacttgagcccagtggaggagttatgcttgattgagaaggaggcgctggccagaagcacctgctctgcccgctgatctgtgctgcatttcagctgttgatggcgtcagtgcttcctgagtcttggggaaygctccttgtaatctcctttctctcgtccttctcttcctcaggcacatctccctaacacttcctgccaccttccgaggcaggaacagcacccggacggactacgagtaccagcactccaatttgtatgccatatcaggtatgtggagccaccgctgcaggccagctayagagtctgtgtcccgggcgccacctccttccacacgttctctgtcttctcrtgggatctgtctgccttacctctcttttcttccctgcaggggacctgttccctgcagggaccaggccttccctttcctttgtgtcgccacagcacttagagaagggccaaatactcagcatgttttgaaactaatgatgaaaaacaatgtgtrgatttcacagggttgaagggaggtttccagagaatactcgccacattgttcacctgccagacccgggcaggcttcccacggggcctcgggagcagcgccgagctgagccctggtcggctcaccctcccatatccaagtctgtcctcacctctcatttctcacagccaggtttgtggccagcgggtacactggcggtctcccctcacacccctggagcatgagtctgtggtttctgaactcggccttgaaattgatagtgttaccttggcaggaacttcatcagtcctagttttccttttcaccttcacccagggaggggaaaacttacaagccttattacagaattgagattcattaggtgcttggcagcacaggtgacttgctaagagccgaggaaacccacaaactcgcctccgattatcctgggccgccagtgaggggtgtttgtgtataaggggaaagtggcaaatcagtgccacttaccagcacacacccttaatggtgagtgacattttgaacacaggaacatggcattcattcatgttccataatgaatcggttatttaaaaggtaatcttttttctaaaaattgcaactacaggttactaaatagatgaaatagaacaatggcataattcttgtcagtattagtttttctcgttatgatcactccctaataggtttggaagtataagcaaaagccagttgttccatttctgggtgacattcctgctgagaaggggaggaacagggatgttcttaagcccccatccctggctccactgcaggagccaggctctccaaggggagagggaacgtgtttgtctaagaacagcatctccagggagaatttcttttgtgctgtggctatttcagcagagtcgacaaggagcataacaagtgtggaaagatgacctattttgtagaaaagctgaatatttccccagatgcttagtggcatagaggtgcagaacaggcctgtggaatccagcagggcgcccccattcagaatgcacacaagggaagcttcatcaaaacggatgactttttttctgcagctcacaaatctttttccagccacagcgtttggctacacccactttacctgtgttctctgatggctttcccagctgttggcgtttctgcaggaaagagccacagagtgaaatctcctatggtttggcaggaacactgctgtctgcctctggaccgctgcttcctcgccccgcagctttgatgaggtgttgtctgggttcatttcagctgttagtttagcaataccaaggtaacagcctcaagacacaggggaagccattcagaaacttcctgttacatttatgtaagtggcagtcaattggattttatcttccaaacagaggtagttgaggctacagcccacggcagcaggcaatttcaggcctcctcagtggctgcaagcaccaaattgctctgccagggtccaggactgctttgttgtgttgctgccagaaataccctgcaggacctgctggctccataaggcctgcaagctcagcactgggcaactatggtacaactgggaaggctgcccgcccacccactggcagcctgcctgcgagtcattctggctagaagggagcagagaccacctcccttacccccatatgaacagtatttggcactgagtggcctatctcagtttggtattgtgaagttagggtttccaatggtttcttccaaaaacagttaaggcaaagtgtgccccaggccctagcccttgcccagtacccatgccttgatagctggagttctgctgataatgaaatgaatcatcaaaccgttctgcctctgaactggccctggcacaggttcactgcagacttcaggagctgagcctttggtgcagactcctggcgggctctgtgtccctcctgaagacattcgattactgctcccttagtgttccatcccttcctaagataagtaggtttcaaaacagtgtaattagaaatttgaaaaacagcccacacttaatgtgtatgtatggttgttaaagtatattaacttttaaatgttttctcagtggcatacctgctagtagattccttttcctgtatctttcactaagacagttggctcccatcatgsctgctaagggtgagacgtggcacagagttgcaagagacaccagtggagacgatatgtagtcccatccctggcacaaagcagtgctcatgatgtggtcatggaaggaaggaagagacgaagggaatcatttagcctcctgtctgccttgcacaggagtaccctcccaaaaccctgggccaggtagtcatcctgattttgctgcttgaatgcctgtggtgtctgggaccaccacctcctaccagcccacccatccctgtgagatccttcctcgttaagcagggctctatcttcctgttctttcacatccactcagcaatttgagacactgtgcattctgccgaccaaaatttgccagctgttctacacagtccagtcgtatctctctcttgcccacggaagtggggtgaggagctctaactcagtgctgaaatcctgagatgcctgtggcctgcgctctgctctcttgtaccctaatccaaacggccacggccacaaagccagcatccatcctcacacttgtcctagcagtatctcctagaaaatacagatgtgcaaaaagatttatccacaaggataagcaccgccacttctcaaaaataatacttcaagtcaggggtgggaggtggatagatcttaaatgccccaaacaaagacgaatgcttaaattacaaaacatccatacagtagccttaacttttcagccatctagaagtgatgacttagattaaaagatgtatgtgaatattgttaagtggaaagaaaaacaggtaacaagtcagaatatgcagtgatctcattttaacaattacgttctaagctgggagtggtggtgcatgcctgtagtcccaactgctcgggagactgaggagggaagatcccttgaggccaggagtttgaggctataatgtgctattatgatggcctttggaaatagccgtgcactcctgcctggggaacatggatcttgtctctttaaaaaaattaattttttaaaattaacaaaaaatacatctaaaggtctggaaaggtccacacctaagtgtttatggtggttttcttgggactttcatctttttttggcctctttgcagttactcattttccataatagcacgtgttgcttttgtagtaagaaaaaatacacacctgatgtgagtgtggcatgtccttggtaaaccctgccggcctgcaggatcaccattttctcctgagcactcatgagtctatgctttcgaagtttactgcagagcacttccagaccacagatcaataattttcttattgtcccttttagaaaatatgattttttttccctgttatgcagtcccctgaaatcacctgttcattcgagttcctcagagatcactgtctgtaattccagcaccatcctttatgtcctgctggccctctggatgtggactgggcaggcaagcagccggctgctccagccacctccctgccttccttgctcttcatgtcccccatcagtgtgtcactctgtagggttttgaagatggttttccctaaaaggataaaatgatggtcgcttggcttggctcactctgttacccatctgggttagggtcagcaaactaaagcccatggcccaatcccatccagggcctgttttgtgtgacatgcaagccaaggatggttttaatatttttaaatagttggacaaaaataaaaagagtaatatttagggacatgtgaaaattatatgaaaatctttagtgtttgtaaataaagttttattgcaacacagccatgcccagtcctttacaaatggtccatagctgcttcacgttccaatggcagagttaggtgtgtgcaggcaatgccggatggccaagaaatcctaaatatttactctctggccttttacagaaaacatttgccaacccctggttagggtcatcactcctaagccatgggtgctattcatccttactctttctagctgtaaacaaaatatttcaaaacaaccttttttgatagttcttaccttgctgactgtagctttcctggtgctggtcttactggtgtgacccctgtagctttgtgcctttggtttttcgagcatgcctttaagatcttacctctttggagggccctcttccgggtcatgttgatttctctaggttctactccaaccccactcctgagtttcctggtcaggactcttagtggctgttacttttcttaagaacatcttatctttcctgaaaagtcttctattttagtcccaaatggtggcaccctaccttttttttttcttggattttttaatatgtttagatgtctgcccattcactcatttctctttcatctattccaaaaggatttaaggtagctccaaaaatacatacggccaaatgaaaatggaagtgaggaaacacaagtgaatggaaataggatagaaagtaggtgcggctatgtgcaggggatatctagattaggttctgaggcagagggctgtcctttaggggtaagagagaaacaagctagttgcttgggaagaactgaactattctcttaagcccgaagagctgtccttcctcataaacagggtcccgtgggtcagcgctgactcccacatatgcattccttagaaagctgaacaaaatgagcaaaaaacctctaccgccaaaatgagtgctcttgttttctttatttctttagttctgcactttcccacattattgccacatgagtgttagtcctatggatacatattaaagctagtagacgtctcagacaacactggacatgaatgagagaaatataaatatttaccaccttgcgggggggaggagggctccataaaatgctgtaaacaatgtaacaattgcttttcaatgattataactctaagtttgataagaacagcttatacatatatatatatccatgtattggggggacacctacttgtttgaaatgaatctaaaatgtctgaaagttgagtgagatgtttcttaagaaatgttcttgtggtgggtgtcaggcaccttatgggactggagacctcggggaatgtcaggaaagacagatcttcccygaccccctgcccaaacctgctgctcacagctgccccagaggcttcctataaggagaggggccaccaaggagagcacagtgcggcttttctaacctaggagggttttttgtcttacggcaggttttgcttaacaaacgggactgtgggatgggaaatgataccatcctattcttttgttgtgtttgttgttgtaatctgatttctatctccaagtgcacagtttttaaccatagaaagcttatttatctcttttgaaaaaaaattgacatagtaaaattaagcaaatacctattaaaactggcatataataagaccaaaaaatctcgaacaccctatgaatgcagggtgagccacagtgcagaaactctgcaaagccacacagtgcagtgagctgcggggctaggactgctttcctctttaggacctagacaggttggctcactgacatcttcatttatccatcagcattaggctgactattaaagtgaagggggcacacaattgtcccaggacagaagctgtaacctgaatctatcctggcagactggggtgtattggccactcctctgccttcagctttttttcttttttttttttgcttttctttttgattgctggaaaagccagcttattgccctccacagctgtttgctttttaaaaaccagcccccctttcaggatgtttgacaccaggaaagatgtcggtgtggtcaagtcagtgtccatcatctcatcagtttggatcatggccccttgtacagagagaaggaggattttatctgtaactcagaaccgtgggtgagccatgtagctctgacattggagtaggaaagcacaaagcaattaaaaataattaatgatttctgaatatcagccttctccatgcagttttaatctagtcctcatttaaattggaagatggacatttaattatcagtattatgaaattcatgatttatatatttcatccaattggataaaatttctgccaccagcttttcatcttatgatgaaaaaaatgtgtatcttacaatgtgatcatttaaaaactcatctacagcataccaaacaattccaaacatattttcctttcatttgcagtgattacatgatttctgtctcttaattaggaaaaaaaaaactcacccgggaaattgaaaataaacttaatactttaatgatcaggaagcactgcagggttgggaaaatgaagggtaaaagactcaaacaatggggtgcttgagaagcgctgttctctcctgtgtcaggtgtgctaacacaactgcttggcatgttgtaatgttcatggtttgatgccacagaatttgcatccacattctgggtgtgccatgtgcctgtggttctccttttccctgtgctcgggtgagtgtgtgggctgagtgagtgtgttcctgataaccaccaaggagggaaagagccactgtcttctggtgcaagcccctgagtagtrttagcctctgctttcacaggggtccctgtggcccttgtcttcagtggatatgttctcgtggctcggggtggcattgcatttctgaccctggcttccctgaggttcttcgctccacagaggattttcgtaatcaccgacaactggctcaagcggtggtgggtgagcgtatgggagggttgccccagatctgagacaggaacatcagtttggcacagccactgataatagcatatgggaaaattcctgaatgaagtgaaaagatatgtataataattgtgcttgaaccaaggaggaaagaagtcattttaaagacagatacatttttatcatcacctataagaaccatttttatcatcccctataagaacccttgtctatccatctcctcttgccctgactgacaacaaaatcaagtataaagaaaaatagaataagaaaaagaagaaatgaatgggagcggatggggaattgatcgcatggtgtatttgtatatcctgatgtaaaaggtgcggctgacaggtggccaggtttgctccgtacacaaccatgtgtgtgctgtcaggcgcacgcacactgccttgtttcgattgatgaattgcctgctttcttgattaaaccttccgtcacttaagaaacaaaaagcctgtgtttagatggcagagtgggacatgtcaaaaaaatctgtctcctttacctttgtgcagatgttgggcacagactgtaacatgtattattaaaatgaatgtggcatttactgtgcattattcctttcctgggagaaaggactgtaaattatatgctaataataagctttaaccctttcgaaatgcaaaagatttaagagtgcaaatattcatgtaggcctggctaattggatgtgcttttctacatccaccacggtggctgtgtcactgaagttaatgaacagcgtgtgcaggcagacacacagggcacttggggaactcctgcctcctggaggttttctgcagtgcgagtgcctcctcctggacttcacagagagatagaccctgagaaccctgagctgggctctgggtcatcttactccagatgaagtccatggtcaggatcagttccccagcaggtcctctgcagctgagtgttaagcgtgggacctctcttcgcacacctgcattctcacttagaatgcagggcccacagaaggccgtgggcccgggccttctgggctgcagtctggcaggtatcaggctttggtgcccagcccttacttgactctcttccttgaccaggcttttctagcctcagcccagttgcccaggtagctgactcatctctccaaagacctccttggtccccttgctcctcagatcacacctttgtgcccctccacagcctgactgcattcattcagacctcagacctcacctgcctggtgttggggctgtcaacaaccagccccacccgtgtcccaccagcctgggtcgctccctgcgtcctccttgcctttgtcttgcgctatgcttgcaccgccactccagcagctcagatttcaccaccttctcttctctctgtcccyggctgtggctctgaaggccactcccaagctgcctctccatcaggcttttctgattcctctcccgctgctgatgctctctcctggtttaccccacactactctgttggagagttttcacctgtgagcaccttgagtgagagggcagagaccatatttagagagaatggaggctcccctctttttttttttttaattgaggaggatgtaggtaaacaaaggcaaagacaagagcaagattgttcactccattcactcaacagtcaccgagagctgccctgtcctgtgctcctgagggcaagcctgctgccctgatagggcatttggggttggaagcatagggtcagaatcttggctctgacacatactggccatcatacagtgctgctgtgagcagttgccaaggttgtgcactgcacaaaatatgtgactagcatcctctagaactgtacaaggaccctgcacaatgctactttgggcaatgctagtatccatacctttaaaacaatgcagtaatgcccgtttccttcctggattgttgtgaagatctagggtaggtaagaacatttcataaaccaggaagcagtgtaggaatgtcacttctctccttattcagctcccctacagggatgtgatccaagaaagagcccaaagacttgttgagaattatcacatgggacacgctggcttgggcccagcacggtcttcatcttcttagccgtgtgcttccttatataattttgatatataagattacttctcagagtgctcagaggaaatttcttcctcagtccagagaaacttgcaataaaaggctctctggcatggctcagctcagtaccccctggaagccgagacattctgtcacgcatcaccacttagaagtgggctattttccgtggcaagcagcccacgatccctttctcaagaaggtgacagaatgatggcttgggggcaggaaggagagaagtgcttggcagcgtgaggctgcaacttctataaaatctttcaatgtacctttggttttttggaggaaaagtgcctggggggctgatttctgctctaggctttcatttctgcttttcctgtgccccatgggtaggaagaagttaagactttttccagttaagtcatcatgaaaaataaaaatattactaggtgacagatacctcagtgctcttaaacaggcggccaccttcccactgtgctttccttctctttttggtttttaagcayggcagagcttaggcggcactggtttaatgggccacatccccttcttaacttggaaaagggttaaatctgtggtccaggcagccgagggcagctggatgaagcagggtgggagcccaaacagctgggtgcaggccctgtctctcccaccgactagccgagtgaggccagcagagatcctagcctttctggatctaaattccacatctctccatatcagcaattgcagtaacaatatcgatcatttgaacatagcaataggtcggctcattcttatgggacgcttcctgtgcaccaggcattgtctggtgtttaaggtggaggtggtaatgcccacctcccaggacttaaagctatgtgggaaggaggcttgtatattctgcagcttgagatgccccaggcctcgcagtggccagcaaatgtgcatttactgcccctggacttcacagacattctgtccaaacactgccttgactgtaacgttcctaaacacatgaacacagaaaaaccaactttctgatacctttctccctgtatgtttatcttctttgtctagtttttcagcagaaatatgcccrtttccccctgataattcccttccttagagacagcataattgtagacctggccagagaaatgctgaaaacaaagggaacccccttgagcccagcccttcacctgctcttagcacttcttcagaggtttactctggagtgaatgaagtagtgtgaccagacactcctgcctagaggcagcttataccaaattagccttttgtttctttctctacctctgtctctctcaaaataataaactctcagctgagaggggaaaatgatgaaggcaacttctttcattgaaacacrtttagttgtttttgcattattaaaatggattaaattaattaaatgaatttactgaataatacccagccttcctcttacttaccctgtgtaaggtatggcatatgcacttgccatgcattatgttatttaatcccaacaaatccttaaccaagaaaatcttttacagatggggaaactgaggtcttgagagcttgtgatcagctcacagttacacctgtggtasgtggcagggctgagattcagacccaggtctctttgactgcagacattgagctcgaaaccacggtactgaggatgcttctttagcacaggttgcgtgtgaccgtttccctcccctcatcaacttgaaggttggaaatggcacacagacctggagtgaatcgtgctaggactaacttggtgtactgggcctcagcactgtttaaactctcacgtgggcccctggatgatcatctctgggacctcatcagagtgaggcctttgacacttggctgatggcaatgctggatccaaaggaaaaaaggaatagggggtgtggctcccatcactcttgctgggcaaaacggtgaaggtggggagcccaaggcctccttacttaaagttaaatgaccttgggcaaggaactgaacccttctgtgcctttgtctccttacctgtaaaatgggggtgacggtgacttatggtgaagcttagaaccatgcctgggacacagaaagtgctattgatgtattgctgtgattgttggtatccacagccctgccctcccagccccttctcagatcctttcccagccaggaaaggggatacaccaggtatcccctctgatacaccaggtatcccctttgatacaccaggtatcaaagaacctctgccttcatagtgggggctgcactagccttgctgctataaacctgtgtctgggggagcccttggcactgggatgtctcttcgtggtggccttctcttagcctatagtgatggtgggcagcccaagcccatcgtttcacttattgggtctgacccccaagtgttcttctcccctactctagctctcctgttccgtgagtccctgtaccctgcccatgggcagggctctagtttgaactgatagtcacctgtgtgctgccctgcctttcctgcttggaagcttcattctctagattgggcctcctaagagccaacttctcctaaacccaagcccaagattactgagccattgcagcccgtgagcattccttgtgagtattccctgtgagtgctccagaataaccctcacctgtgacccagtcattcccagycccagcttccactcctgcctgcttccagccccctgagtcctccagctgccagcattgccgagctcaagcatctctgagttaagacagtagtggcagggcattggattccgagttggggtaaactctcgatggcctgctaaggatggatacatgcggtgccagaacttggggagaagttgaacagtcgcacaagctttggtgatgagatttatctttcagctcttacacagtatgagggtcccccttttttgtcagaatgaatgcatttaactgctgacattaggacaaaagaaattccgatcttttttagaacaacgaagccacctgtcttgtttggacagagtacctgaatccaactactgtcacacagttggtgtttgtgccctgaatactgaatggctttttccctctttttattaatggccagtgatagtcctaaatgcatttatgtttaaaaaaaaaaatcttcaatcctgcagcctggagtttggatggaatatatttatcacctatcccagagaataaggttcttgattccccagatttgtcttacaattgtctgtaagacaatgaatgatrcagaactctcctccaaggttgagatcctttgttagagagcagtttcttacgcctgacttgttttatagcatgaacgatcgcatgatccactggcgaggcaacatccataattttgaatgagggagtaaagcttgcctcggtggccctaagcatcgcttctggtgacacacttagaagtccttaatcgcttgctacctagaggcaataaacacacctatctttatgttccattgcctgtgtgtttacctgaaatatgccctgygtagcaaaaygccagtttcactcctgtgagaaggtccttggctcatgaattgcacggccttcactcacccctattttgccaaaggtggtagtgccttttgtaggcccaagacgtagcttctttggccaggaaaccccttggctatttatgcttcttgtaaaactctggccatttgcttggtttccgagttctaagaaaggagatccatctctggtcatcatgtggagttcagggttcattctggagggcaagatgatgtctccttcactggtgtgtgcctgatgcccaatgcccagcccagggcctagcatacaggggatgttccatgacactcaatgtttcgttgattctgagaggacctgggtcttagaactggttcacccttttgtatccaccctttccagctacattactttagacagtttatataacattgcagtctgttttctttttttttttgtaattttgaattatattttctcttctgaatttgaggattaaagataatgtacatgaaatacccagtgcctagtaccaagagggcactccagaagyggagctgctataactgccgtaaatattgttattccagggaattgctgcytattataccagaaggcactggtctcattcaccctgcagtgtgacctcacctaaaagtccagcyggggatggagagggtgcagctgacagagggagctcatgaatggtgggacctggcatggctcagggaaacttttggcataatagaaggcaaaccctcccttctagttcagaaatgtgtaattgctggagatgytagcttgctactgggtaaaatgattttaaagagagaacttctcaacatttaaatcagcctcaattttccatgttccttttcatcaagtcagctctggtttgagaagggatcatatcggcactcaaccctttaaatgattttccttctttgcctttctttttctttctctttggccttggctccttcctttccaaccactcccctcccagaacctcttattttagccaaaaaaaaaaaaaaaaagtttctttccttgctccagaatcacaccacccaccgagcacatcatctggaagtcccctgtccctgagctcacttgctgccaggccggcggcacccagaggctcgaaggccacaggggcacaccgtcttttctcagggttggagagagtagattagacaacatcctcagatgtcccrtctcatggcaggtcactgccactgtgaagggtacggctgtagatgcggggggactgcttgtttcttcaggctacattttttaaaaagagatcataccttttctttggatttaatgaggacagacattttaatcagaggttagtcatttatttttgcaaactattgttttgattcatcatttttgcagataattaaatggttcagttggcacagtatgtctactttattaaaacaggtaattttggggaaaaaaagagatgctgttttttggatcactgcacaagaattgcttttatcttcatctttgagcatagtttctggttattttgccaggaggctctctcgtgttcgggcatttggggtcctttctggtctggaggggcttgccctttgatgattgggatgttagcagatacgccctttgaaacgggagctgaagagtaaattctgtgcagccgccttttaggaacactcttaggttttaattggattgggaaaaagaacctacaagttatgaactttgcagagcagcagttcttatgctaaaaacagattaattgtagccctcgcagtgggtggagtttcaaagtcaattactgcttgtcctattataatttacacacacaggatttgaaaaagtctgccacttagtataaaagtgaaaaggttacgtgtactagtttgagtatacctatgacttttcatttgtaaatgctttagctacatgtatgtgtatgtatgcaacttgcagctgtggagctgtaactacatctgtgagcaagattccttatgaagagtaacctttaaggtctggttccttaaatccgtagtggctcagcatatagtcctttgtctggcagtccagtccacttgtgggcacagtggctggcccctgcagagcctaaggggcactccactcatgagtcatgaactagtaagggaatggcccttcctgggtcaattttttaaaagcgaattgctcacaacatttgctttctttaattttttccatgtttgtgtcctgaatcagttaatttactcattaaaagaatttattttaggtggaccaattaaaactttggaagctaattttttgctgagcagagcagacctctgaaaacacaatttataacatggcttctgcccttccacagagagctgtcttatggtactgtaacctctggtgcttgcagaagtacaaaattgctgttctttgtcctccagctctggagctgagctgccgtgtgggtgggtttctcgagccttcccattgttttagggtgaacaggcaagtctgaaaagtccagcccagcccaggagtggcatgctgtatttgtttgcttgcgtaaactccatagtttaattttttttaataggaagctgctatgtagttcggatatttaaacagttattaaccgaatgacaattaacagattgcatagacagattttcttttgaaaacctctgaaattgagtacagtttgcaaaactatcacggcatagtaatgacaatgaattttgatttcccggaactgatattagactccttattaaactatgtgcatctgcttttaatttactccaaataattggaaaatgcaatgaagctttccaattaaagcacggctttatgctgtttaataatacccccataatattatagcttatgaagtgacaggtgagttggtgtatgaataaaacataaaggcagcaataagggacagaaaaccggagacagttgtggggattttaaatgctggatgtaatttgcatatattaatctcttcttttcagccttatcaggcgttcttcagtatttgaagttaaaatagcgttgacaggcgggagtacgcttagttttttcaaggatttattacttgtataatttctgatctttaataagcagatatgactgatcctcatagttctatagaaatcagttaattgttccagatggcgtgtactgattatgcaaaattacttttcacaccattttttttgtgatggagtttggagtaaaattaaattttttatagccttcttatcatgctgttttacagtggtttttccacagaagttgaatttaatctactatattacattgaccaacacagttattctaatgtagcattttgtgatttgacagagaataatagaacacattgctcattgttcattactgtgtccctaataaaaaggaactcctgtgtatagaacatagctgttatttatgaagaatgcctaattcatacagttaaaaatgcaaaattgtattatgaagtagttccttttggggagagaatatctggaaaaagcaaatggaaataggcttgttgctgcagattctacatgctaagggaggagccttcttttaatgaccagcgtgtttaaattgtgctactttctcctttgaagaaggaaaaacccagataatcttattctattaacagaggtgtcactggttgacttgtcttgatttacataatcccaaaagtctttcataattgaatagcatttataaaaggtggttacactttagtgtaaagtatccaaaaaaaaaaagtctaaaggtgtcaatgataattcgtctctaacattttccaaagtgtctgtttatcaccaaggcccttgtgttggtgtcggatccaagtccaggtggtgtgtacccctaggtaacattcatgtaggctgatcctcgtccaggttctcagataacactctctctatggctcagctgctagtgggatatgaagtactcagccgactcactccaaaatgggactgagggactgtcaccttgatgcaggagtggatgcagtttccgtcctttgggaggacctcttcccagagcccagtggggtgggggtaggggtagagagctctctgttgcatcagaaatcctgtttggatatgcggtattttaaatatagcagtaaatccatagaaaaatatttctctgtatatagtctgacctgtttacaaaagagcccatcacatattaagtcttatcaggacttgtgtagacttgggacttatctttctattttaagtagagttgaatmccgtgtatgatactcgatcgctgcaaggtccatctgcttgctcctgatagttctggtccgcctcatcagccattccacaggcttgagaacacgtccttgtttgaacagacttgaggaggatttggatctgtttaaagggttcgattcccttagccctgggggaatcggacttttttttttattttaatacacttccaccagcaacactgattgctcttcatacagggggccctggagtggaagcaggcctgcgttgatgcctctgagcaggctctggagaaacaaagacaagccacagaaagtggcagacctgggagctctgagagctctgggcagggagctcacagggtccgctgggggtgggggcgctaggcagggagctcrcagggtctgctgggggtgggggcgctgggcgcagggtgagagttgctctgtgggagtctggggtctccacagggacctgaaacacagattctgttagaaacccagatgttagcactgccagtaccacacagattgtaccatgtaccttgtactatattctggtcttcagaatatttttggttaaactcttattttgtatctactctggtcttgaaggacatttcacagtaagcctcgaatagtactagaatgactaattaaaccgaacatgaagaaatgtgactcagagcctagagcacgctcacacgtacagtaccaactcaattctgtattcactttacctccagaacttcagaaacgtgaaacctttcacataccctcttctgtaaactcaaaatgtatttttgtgaaaatgaaaattatatgaaaaagagaatgcataaatcagagatgattaaaaatatttgttctaatgcagtaataatttggtagtaatgctttcatcagtatagcttaaggctacattaagtggacagactttatatggattctctaattttaatcttcaaaatgctatctaatgtctcattaagacttgcatataatgtatcttaagtacagtcattaaatatagtttagggagatttatgttcagatattgcttaaagatgttttaataggcccatttactctgatgatattaatgagctcttaatacagactaagcttctaaaactagtggtaaagactcccagcctgaacacaacaacttggaattaatgcctggtttggacagatgcctgagggtgagtcctgcagacactcgagggtcagcgcgagccccttgctggatggagccttgtttcagaaaggggcctcctgtaacgggctctggctgctgactccagagcacccattcttcggccagcctgagtactgtcttttttctcccccaaactgtgcacaggacatgtgctaactaggccgaagtacctctccaaggttatttgagaggcgctgatagccttggcggtggcactggggcctgtgaggggttaaaggaggctgttgctgaacttcccgtggaagcatctgccaggtaaggtgtgcacagtctggcatcgttacgtgaaacagcttccctctgccacgagtgaactgtaaaaggtcacatgggtgtgctttcatctttcaggcattcatcctagctgaaatacatgtaataaagtagtcctgctaattcaacatcagaaagaaaaaaaaagcccaacaggaatctccgtgagcccctcacacgcgtgaaacagttgttctccaggccccacttctaaacgtgtagcaaaaaaaatctgttttggtatttccctctttcagagaaatattgaaaagtacattttttttttgtttcaattattttaagggaggaaaaaaaagaaccagtgagttcagagacttttctaattactaaattggtttgttataaaaagataatagcaaatttcttcttttcataattggacatttcttccctgtaggctaatgcaggcacagcccgtgcatgcacaataagttatgcttttgaaagccataactagctaataacagctacagtgtcatcagagagtaatggtgtgctgattagcataattaatgacaaatggtggtgcggaattggtggattggtttagcggatgatgaatgcggcgaggcctgggctgaggcctgccaactaggcctcgctggctgtcagcccttctgttctcccgatgcagccctcattagtcacgatgggaggtgccagtttgtattccgtttggagcacagaaaacttaataatccaagcaaatgtggctatcccyttttcctctgtatttactcacaaaaccctctcactcattcccattgtggctgaaccattaagacacagctatttccagattcctctgcgaggcttgaaggcgaaacaaaagggagcataatagagagaggcacggatcccagagctttcatctgaccatcaatgaattactctcactaggaagacttctgtttggtgaaccctgtttatctgtgtactttataaggggaaaagagatgaactcagtaagcgatacattctgtcctaaaataagactagcatatttatctttgacttgattaatcagacctaatttgcattcgcaaatgagactgataaaaatggatttaccttttaacctttagaggaggaaaggtatttctctgcaagatttctggggctatcgtttcttaaccgataagaagccactcctttatcaataaagatgaaaatccgcaatttgcattagtgaatgggactgattattatatagttaattagcatctggaaatgaggattatcttaattacaaagcacaatttccctaatagctacaaaackaagtttgatccatgtggaaattggtaacattattatgtaattagtgataacattaatagtgtagaatatttagatgtaatttgcatatgcaaatgtgatttacctgagccaaacaagtggaccattaatgattagagcatgatgtagctgactgaaagttctagatagctgaatggtacctattatgcagaataactaaattatatagtggtagagtcagcaaggaccttttatatttaggtggtcagggtggattttgctttaagaattagtagctgctgggtttcataatggagctaactgcttggagaaatagctagcccataatcatctccttgactttgattttttcatgcttccctatatcccttgaatctgagatgtactttccctatgtattttaacaattctgaattttggatctgtcttacaattgatgtgtacttttaaagcagtaacacacataaagaataatggtgcagtttacagttcttcaggggagaatcagacctttctgaattttatccgcagggccctagaggctcctcccatcagaaatggttctttgtatcttctggggttctatctaacttcctccctcaggctgacatatgcttcccaaagccatgtactcatggtggggtggattttagagtagacatggatgaccttttgaaaactgtcattcataatagcttatcagtggatatcattgttcagaatgggactaaagtcagtgtattgatcagtctttgcttggttatcatgccagtaacaaacacccctccagatcacaatggcttacagtttcactgttttgtaaaatggaacttggaaatgtaaattggaacttgagtgacatatatcaccatgtcactcaagttccaatttggtgaccgtggattggctggaaccctgctccttgtgtctttgcactctgggacccaggctgaaagagcagctcccaactgtaacttgctatttttatagtagagggaagagtgagacctggaagaaacaaccagtggctcttaaagcttctggccatggtggcaaggcctacagccggccaacatgagttgggcagaagtgtatcctcttcccccaatgtgcctttcacacggcagtgggcagatggtcatactgttacagggaagtgggaacacatactcgggaatggtgacactacccactggaggaagctattttgagtttaaaatgtgagtgtgtgctgtaaaaatataaagtcagtaattatactggaaaaaaataagtgaatctgagacatcaggcaccttcctagagtctagaaaacactggtggccgataatgtctgtagcttttccctgtgcagaattttatcttcaacccatcaagagtttgtgtcctcctggggtgtttgggagagctcagggattttgatgggtgttcagcacagtggaagtagcactactttctggggtttaagccccattttgaccatttccaaacatgggaccgtsattcctttctctggaactcagtttgcctagctgcaaaatgaagctgttggacagggtggacckcctgtccctctatccttccaccaatcattgagggccaggcaccctgcaggggctagaacaggtgccttgagaggttttgcctcagggtaggagggactgaggttccaactgagcatgacccacccgtcatttccggtaagagcctgataaaaagtttgttcctagaccaaacagttcattgatatttcttcctcttttaaaaaataaaaaaacagacacaaagcttttacttacctgaatgataaaagttacatgttcattgtagaaaagttacaaaatatatgaaaacattggaaagaaaatatcacaaccccattacccagagaaacagtatttcagtgtatgtccttttaacactttttctatgccatatgtttacacttaaaagtgtatgtctacctaattgtccattctgggttctttttaagtcagatttattgaaatatatttacatgtaataaaatccaggctttttatgtgcacatttcagtgacttttgaccaatgtcaaactacatgatagccgcctccagaaacaagatacagaatatagccaggagtcccataagttcacttgcctccatttccggcccttccctccccatcgccagtccctggcagtcacttgcctgcccaktgctatcatatacatggactcatacaatatgtagctttgtgtgtctctcagcataatatttttgagagtcttccatgttattgcatgtatcaggaatttgttcctttccaacactccaggtgtctattctgctttgagacctgttcatgtacctcgttccttgtcattaggtcaggtggtcgtcaggctgggattaatggttgtatcatcctccctcttatggatacaatgtactttacctagccagtcctcagtggctgagtttttacattatcttcatttctaaaagttatacttcggtgaatgttcctttaaataaatatataaacacatttttaattattttgacatataatgacaaattgtcccccgtaatggttgaatttgtttacacttctgcatgtatgaaagaggtttgtttggtttggttttccacacaagacttgctaactggtaattttttttttttaatttttatcaattggaaggtgaaggggtattttattgttaatttacatttctttgattactgctaaggttgcctgtgttgagccacttgtgttactcgagacctttgcctgtctgtccgcagcatctcttccattgcagtcttaattttgtttgtggagttgcgggagctcctcttgcaacaaggccttcttttgctctcacattactaccgcttgtttccagtttctgctttgtactttcatttcatgtttcctttatgttttgtgtctttgccatcacgttttagaaaagccttctcggttttctggtatattctagtaccttcattttttttaacatttaaatctaaagttctgctgtgatttgttttgatgtgtgacaagataagaatctatgtttttccaaattatttattattgtcccagcatcacttgttaaataatcttcttttaaccaactcatttggaaaacaatcctataataacctcttactgtgatgtattttgtggcctgtgttgtgttccattgagttgaatgcatattccaatgggagggtcacgcttttaataattataaatgtatgtattttaatttcttatcttactattctttgtagttatttttcagaatgttccaggtaataataacttttttacccagtagaaatttagaatcactttaagttccaaggaaaatactttgaggattttgattgaaaaaaacattgaagttataagtcaatttggggagagtggtcatttagaaaaatatccaatctttccttccagagatataactctctattcaaatgtctttgtatattattcagtaacatattatagttttctttgctttctgtttatataattcctaagttttaaattttgttgcattacccattatgttggttttggtttttgttttgtttctttttgagacagggtctcactctgtcacccaggctggagtacagtggtgcgatctcggctcactgcaacctccgcctcccgggttcaagcaattctgcctcagcctccaaagtagctggaactacaggcacccaccgccacacctggctaatttttgtatttttagtagagacagggtttcaccatgttggccaggctggtcttgaactcctagcctcaagtgatcctccccctcggcctcccaacgtgctgggattacaggcgtgagccaccgcacccagcctgcattgcccattatgttttcattggtgattaaatatttaatttaatattgttgggtctttttttttcttttttagagatgggggttctcactgtgttggccagggtggtctcaaactcctggcctcaaacagtcctcccacctcagcctctcaaagtgctgggattacaggcttctgccactccacctggccctgttgttttttttaatcttcatttggtaactggccacctctctgtatgcttgttatttccaatagcctccagtttatttactgggattttcttggaagacaacatcatctgcaaatacagatcattttgtctctttgataacatttatacaccattggtttttcttgctttgtatttttggctaaaacattgaaagcagtggcagtagttttcattcttacctggttcctgactttaatgggaatgcttctagtgtcccatggttaagtctgatatagatttgggggaatttggaggagagagggcttgattgtattaaaggacccattctctattcctattttccaaagattttttttttaataaattcaggcactaatttgagtttcatataaaaaaatttggaatattttaatgtagtataatattttttctcacttattgacagatacagattattttgttttgatgatttagcatttagaaagttattgttatatttctgaaatcaatctttattatggtgcattcttctttaaatatagtactagatttgagccactgctatttaagttaggatttgggcatttatataagtaagattaggctttttgcttatcaaaatgtaatttttgtgtgatctaagtttttttcaaatataaaaatatttctaaaatatttaaatggctgttcattttggggaaaaaagaacaccaaaaaaaaaaaaaaaaaatcctgtctgaactatgtggacctggaagctaggggcattttgaggagatggacaactatttcagtttctttcagcattagtgatttttttcaggctttctactttttcttgagccagttttatcatgtgtatttttttaaagaaaatatagcaatttcacctaaatttcatctaaattttaaagtttattggtacaaaattttacttaagagtttgtatttatcttaaaattaatatacctatagtcatatatatcctgatgttatttttctctctctttttcttggttgatttatttgctttatttgtctttccaaataactgctttttaaatttataaagccattagacttttgctttatactatttaataaatttttatctgtattagttcttttttttaactttcttttttttttttttttttcctttgagacaatgtctcactctgttgtccaggctggagtgcaatggtgccatcttggctcactgcaaccgccgcctcccaggttcaagtgattctcctgcctcaacctcctgagtagctaggactacaggtgcgcaccactatgcctggctaatttttgtatttttagtagagatggggtttcaccatgttggccaggctggtctccaactcctgacctcaggtgacccacctgcctcggcctcccaaagggctaggattacaggcatgaaccacactgcccccagccacctttttttttttttttaactttctatttattttagcttttttaatagcttcccttgagtggttccctcatttgttttctgtccttttttgatttttaataaaagtgtttagggttatataaatattcttgtatattgctttggtggcattctgtagctttcatatataatatttatttataaatacataatttcagttttgattatccctttgactcaagtgttagaaaagacatttctaagtaatttttgaaaccttaatttctacttttattatgtaattatccgagaatatgacctctataattttttgttttttcaagtgtatttagtctttgcagtctaatagatatatcagttttactaaatgctccgttgatacttgaaaacacatcttctctctgtcacagtgtttgagatacactcccaccatcaacgttttttgatcaagtaggatggatgggtatgtatacccccatatagatatatacattcattcattcaatttgaccaaacaatggtagcttttgttttgcacagttcttctcatgtcagtatcattttgatcattggttttattttgtatgttcctatgcagtgttattgaggccatgaaggtttatgacggttaaaggtctattatgtattttactcttcatcgaaatagaattccccttttgtcgcatctcgcatttttggccataagttccatggtgctcctgtcccttgtggccctggctctgagtgctgcccctcctcctccctctgctctggccaggtgaggcttctcctccaggggttttccacctttgctgtggttgtctcttccaccaaagagagccctcctgttccccaccacatccctgccagcctctgacctgtctgtgtctccagctcttcccagaagccctccctggcagctcctgtcctcctctgctggatcctgtgagcaccacagcctcctgtacaccctgagctatgcctctcaaggccctccaccagctcatcccctgctgtgggcacaagccctgctttcagagtttccctgcccagggaatgaatgccccttgagagaccacacatatgctgcaagtccagccctgctcagagccgttctttgccaaataatcaccttgttattaaagagctgattgttctactagactcttctattcttatggttcaccatgaaagaccagttaattcactttttaaaaattacttcaagagccttgtgtttggccgttttgtgtttctataaagaaatacctgagactgggtaattcataaagaaaagaggtttaattgactcacggttctgcagactatacaggaagctccagtatctgctcctggtgagggcctcaggaagcttccgatcatggtggaaggcaaaggggaagccgatgtatcacatggcaagagcgggagcaagagaaagagaagggggaggtcccaggccctttcaaacaaccagatctcggtgaattaatggggcaagaactcacttattaccaaggggatggtgctgaaccattcatgagggatctgccccctgatccagtcacctcccaccaggctccccgcctccaacattgggaatcacatgtcaacgtgaaatttggaggggacaaactgccaaaccatatcaagcctcatcccagaactttgatcattggaagtgcttatttgaaatcttcccatcttccctgatgatactccaggggcccacaccagagcgctaggcagcgtggcatagaaggaagggcaggggttttagagactggctgcctccctggctggacatgatcccataacttgccaatgctcccgtcagctgcccagttccttgcacctgtctctcaaggggcattcgttcactgggcagttactgaggaaactcccatgtgcccagccctggggcctggactggcagagagycccgggcagtgagtgggagctcagagcacacggggcccccacacaccaactggatgcgacctgccaccggtacaaatacaacctgcagaagtcggatgtgctggtccctctgttgagaaggctcggtggccgcaagcacgtattgcagtccacagaaccatcctggcagatggcaacggctgtagagaagacccgcaggccctttcccttgcaggtttgctgtctgacagacaggtctggcctccctggcttcctgtcattaatgtggtttcagatgagagtgaccccccacagcacctccttgctaaggctcatttccagaggaaggcagagagtcattcttcatggttaagaataaggacagcctttaatttcagcaaatttagccacttcctttctgcccagaggcataggaatatttctgaacctggacagggctggcctgggcccagtatgttctgagtcccatgggcaggtatgcttaggctggggtgactgttacatcattacctgcagcgagagactggcttttttcctctcctgactggccttaccatggaaaagcaagtgactttttgtgtctgtttggtttcaggaataataatcaatttttattgagctaagtcaccttcatatataaactcatttaatccttgaaaccactccacttcccattttacaaataaggaaccgagattcagagaggttaagtgactttcccaacatcacacagcaaatcaaggcagtggcccatgggtgccttcattgtgcctcctacggaattccgtagtaggctttctcactcctccactcttagttttaagttgctgtctcatttcctaggctgagcactccatgagagatgcccttggcctcctcacatctaacatcagagttaaccgtgagagctctgcagtcaagttcatgtcgcagtctggtctcgcctgtgcccaaagcctgggagggcccatcaggtgatgagtcctgctgctccctgcactgtgcagagcagagcccctggccctccctgggaaggaaggtctggctcccaggtgggcggtgggcaagctccacttcctctcattagtcagcctaatggatggccggctgagcttccagatctgtccggggactagtggactcttaccgcctgctcccagagcagcctgggaagctagcccccattggggtgacacagatggcaagcccaaatgacaaagtaaactccaatatgtcttggagacattgtcagcctgcagcttatttgtcatgtcacagcagccttgtggaccagggatgtactccctccccggccctgctccatccccatgtgaggattatttacaggaaactgcatttgatagggctggtggggagggcatagagatggaggggtgccagaacagaygttggtcattttctcacgtttgggaaattaataacactcacttacctagcatttatagagtgcttcacccaaactctcttcaagtctcatagcaacccaaagaggtgtcgatataattaatcccagttaatagatgcagaaaccaaggcatagagagctcagtcaacttgcccaatcacacagctaatgagagctgggattccggctcaggctggtgcagcggaggctraaagggcacttgctgcctgctcagggctgggttttgggaggcagatcaagcaggaggaatgacaccctgtatcccagggatgtccttcagccctgcaggtgcagaccagctgtgccacccagcccaaaaggggacacattaagggagggaagcggcactgtttggcctttctcccatggtgactgggctctgcggtgagtggctgtgtttggggctgtgctggacagcaaggtcacgtactccaccctaggtggcatctctgcatcaccagaagagcaggggtcagaggaggaggaagaggcttggcaggctgagtattcccagccttgcctttcacaccaccactgccatagggagtcaggcccttcaccatctgggcctcagcgtctttgactgtagaaacaaaaatggaggcatgaaaagcctcattcaagaattgcagtgaagatgaaatgaaataaagcttgcaaaatggccctgcccacggtaggtgctcaccactgtagagaatggctgggaagcagtgcagaggggactctctcaaaggcctaggccttttgctgcacctccaggtggaggagggtgtcagggacaggtcaggggtacttagtagagggtctcgagcaaatgatcccaagagctgcagcccatccaggctctgagcaggaaccctggagaccagagacagcaaggctctgtgagaactggattcaagcccaggggaatggtcaaggctgcatctccctatccccagctcccaaagcagtaggagttcaaacccaccgggacaggggggccaaaaagctggacagagggatgaggcactgcaggaactccgtggtgggacacgaccctcccactaccttccagaagcaggaagagaggaggcacaagggtcctgggtgggtgcccgggactcatgtcatctggagggggtttatttatctttctgatttagctttaaagatgcccctgaacccacagcctctggtcacaggtaagcaatgaaaagccaggtggaatatgaagagcagattaggttagccgtgtgactgatcccaagctgtttgccgagtctctgtgtaaatttcatgcaggttgtctgattgaggacacctggaatgccgcgggcttggtggttatgaaagtcccactgtttcattccttagccccgctcaccagttatgtgcaagttgaaccgtaccatcaaccccattcccagcagctcctgtgcatgtcggaggcaggggatccttgtgtcaggcaccagcagatgcacctactttttccctaggagatgaaaaaaggaagaatgtgagtccgtgccttcagctcatgcgtgtgctcacgtgcaggcacgcgcaaccagggctcccagggagaatgtgcattttaaacaatagacccagcctaattcctggtgttcacgtggaggccattcagccagccctgagccccaactacttgctggtcattctacttgaatctgggacacaaaaggtaaagaagacatggccctgccttggagcctggtaggctttccctcctcagctcggaccagcactggggactcagctccagacgtgtgcagaccctgcgggcccacggrgttgcctgggagctggggaaatgtgttccctgttagagcgctgtccatttggtgatttgggggcagccggtgcaacacattcagcagggcctcaggtcgtttggccagactggaaattggttctatcccaaatgttgctggaaataacaaggcagctgttcagcctctctgttctcagttagtaagtgagaaaagtgtgtgaacccggcagaggaaagaaagagttgtcagagcccatttcccccatgcctttgatcttgctgacctggatgtttgggtgttgggggtgggggtgatttgggagtttgggtgagttttttggctgaagtaattgggatgtcttaggaagcagggaaggaagggaagttcaagggtaattgctaactgatgccagaaagaaaaaataaatgaaatgcttaggcacttcatggccctttattttccagccatttctgcaaattgcagtctagttctttctcagaaataagtgacctgctaatacagggtggggaatagtggctgtaggacaatgaggtttaatttttaaaagctctggactcaagtcccagctctgcccccgagacaagcccctcaccttctttgagcttcaagtcagtcttctatcaagaggggctgaaaatgcctgcctcccgggattgtggtaaagactaattaagagaagacttgctgaaagtgctttgtcagctgtgaaatatgtgagaaagataaaatccctatttcttcaagttcagcgggtttttagtgagcatctatttttgccagaaaaccccacagacgtgccacctccccgtgagcatccccacccaccccagtgcattgtcaaggacacatgaacttgtcaactgggtgagcaagcaggggaggggtgaaaggtccagctgcaagcagggaagcagctgagcacccggagcagaccagggcctggctgggcagaagggactcccagagctcaggagtgttgctgtttgccccttctcccttctcaagtatggagttttgttttcatacctgaggttggaggtcctagtgacttctttctgcctgtgtgggctgtagaggaatccgttgccaacagcagtggcctgtgtatcaccggctgcttcctggaagaggtgttcattacacaggctcagcctctgcttgcccatgaggctcttgcggtttctttcttctcactatgccccttctcacatgtgcataactcgtacatggacacaatctcacatgcgttacgtggcacatgcatacactcacgtgtggcacactctcacgtgtacatacataccgtgtgcatggtcttgcatgtgacacacagcctcacatgcatatgtgcacacatgacacgtgtgcatgctcacatgtgtgcacacatgacatatacacaggtggcctcccctcctctctggatcatcaaggataccatccagattaccttccagggctgggacaagggctcaccaggccccaacagggcaaaagacaatgagagaggcaagatggaagtctggtgtcccatcagggaaagtctaagtgagaaacagacgcggtaaagcagagagcaccgggagacaggagaggcatggacctcagagtcagtgccgccaccacctgctagcacctccctttggtcccttcagcattttaaaacctgctttctgtactgagaaataggctttcttcttttattttcaaacttcaaagatcagttttgaaataaagttttttctgatgaaattccaaaggttttacacatgtgtgaaaggagaagtttggctgttaaaatgtgttcaccctgccccttgctgccctgacccaccagggtcccaccgtgcctccactttgttctcctaaatgctgcaccagctcacaaccaccaatagtgtgttgttccagcctctttccttcatccccctaattcatttgtgttcagctagagcctagtggggcagaattgatttttttgttaatgggaagaaatgtttcctgtgtaggcattgtttaccactctgcagctaatcccattgagcctcgggctcagtaagcgggacacccaggtggcctggggctgggcgagtagaaaggtggcccctggtcttagccaaaggagtgccctgttcaagcatcaggatacatttgcagtggccaggggtatggaccttgcattttttaacccctgcatggctttagccccataaagacccaactaaataagtgagatggaagtgaatgttttcctcttctttttcattttacttttgttaagcactgcataatgtgcatgccacgtaatacagtgaatagccttctggtaggggtcgatgaccataattgagtttttttttttttaaccagccaggaaaatgcttccttaatcaatgttctttaaatgctttgacacatggtaacaacacaccacagagatgcacgtgccgctctccaccagactccactgataggaatactgggcagccctttcttcccttccctcctgtgagcctgtgggtgcgcagggcagccactccggggatgagcgagcatgcaccatgatggcgattccaggaaggatcttgaaccacgtcctggcagggctacctgggccaaaaccctatttctaggccccttaaaggtgagcgggcttcagctctctccccagtaagacccacaactcccagtaagaccctgcgagctggctagaggtgaatttattttattttattttattttttattttattttattttattttattttagatggagtcttgttctgtcgcccaggctggagtgcagtsgcgtgatctcagctccctgccacctccgcctcccgggttcaagtgattctcctgcctcagcctcccgagtagatgggacaacaggcacgtgccaccacgcccagctaatttttgtatttttagtagagacggggtttcaccatgttggccaggatggtctcgatcgatttacctcgtgatccacccacctcggcctcccaaagtgctgggattacaggtgtgagccaccgtgcctggcccttattttatttattttgagacagggtctttctctgttgcccaggttggagtgcagtggcaagatcatcactcactgcagcctcgacttcccaggctcaggtgatcctcccaccccagcctcctgagaaactggaaccacaggcgtgtgccaccatgcccagctgatttttttgatattttatagagatggggtcttgccatgttgcctaggctggccttgaactcctgggctcaagtgatccagctgcctcagcctcccaatgtgctggaattgcaggcgtgcaaaccactaagcctgactgaagtgggtatttgagcctctaatgctccctgttacagttttgctgtcgtggtggttctaagacaataaactttgataggtcgttttctttctttctttctttttttttttttttttttgagacggagtcttgctcttttgcccaggctggaatgcaatggtgtgatatcggctcactgcaaactccacctcccagattcaagcagttttcctgccacagcctcccaagtagctgggatcacaggtacccgccaccatgcccagctaattttgtatttttagtagagacggggtttcaccatgttggacctggctggtctcaaactcctgaccttaggtgatccgcccaccttggccttccaaagtgctgggattgcaggcatgagccaccacgccccgcctgataggttatcttgaacatctcttcccaatacagtaattagaccttaaatgtttttgttggatacttacctccaagatattcccaaatctccaaatttaaaaatagctctttcgcacacgatttctcccacagaatgtagtaatgtagatatgaaacattcaggtgaacttgttagaactaatggttctataaataaaaactgacatcattcataaagttatttaaataaattttgtcactaaaataaatttatatgttacatcattgctaataatgattttaactgtgagttttctttttgtaaaaaagaattgagccaagccccagggtttttctaacaagctgacgggatacttggctggggttctcatcctgcccctccctgcttccagctcagatactcggaatatggttgaagcctgactgaatcataaagactgcctgagagtgggagaggaaaggatcagttactctttggccaccttgaacgcgcagcttccttttcctcctgggatatggggtctgaggcatctccttcctagaggccatgtccatctgcattgcagggtgttctgtgcaagagccatgctcccctcgagtttcttcagctgatctagtaattacttcaccagcagcaggctgctgatagcgcccctgtttaacttcagtttataaaagaaaagaaaaagtaagcgtcttacaattctggaacctcctttcctcttgggagtctacgtatgggccccggcttcgtcctgaagcagtgtcaagagtcctgtgccgtctgctcatgccctcaccccacgagtttaaccagatcttcagctctcaccagagtttcttccacagtcagaagcccttgcactaggctcgcaaaccctttctmatttccacatcgcatgtgtggcaggctyattcctcccagagtagagctgagctgcgccctcagcccaccctcccctttttaatcgatgtcagctccttcccttacccacactgcggccaagtctctcccctttcttagacctttgggatcccttcttccctccatcaccaacattagcagttggctcttgggtgggatcagttttttaaaataaagagacgaagtgtcacttcaagggaggtactgcttttgcaggagaaaagtggggcgcctctcagccaggctgaaatctgggagctgcatctgactggctcgctcactggcccaactccccactgaggcacgcctgctccaggaaccccagtgtgtgccaagttcagtgacatgtttatgtcatgaccttcaagacttccaccaatcctagccaccatgaatgttatttttttaaattattttattatattttagatttggggrtacctgtatgttgtgtacgggtagagattgggcttctagtgtacccatcggatgttggagtctcaggtcccagagagtcagatttcaggtgtgaggatgcggttgccagtacttccattttctccgcattttgtcacacctcagacaacacaggttgagactgaatgaaaatagggacgcgtcgcctgtcgttctactgagggagaacgggtggtatgtgtttgggattttacaggcagaacatttaaaggccaccttgtgttttctgaaccttaggcacaaatgaaatcacggcttggtgcttgtccaatagcctcgctggagtcaagctgagagcccctctccaccaaaaccagataataaaagcgagcaaaaagcttgtgctttcaaagtatgtctggcaaaagacgatttggggactttttcacaataaagactgagcagaaagcgaatagccattctcaccatctccttgagctcctggaccccaccgtcagtagccctgcactctccctcaccacggggcaaccttgacttttgattgtcaggtccctgccaggtctctgctcaaacggtttttccactgacccaataaatgattatgtaacagtcaggagacccctattcagacaacacctggttctgttactcgcccrccaggtcacactgagcaagcgggtaaacgtctctgtgcccaggctcagcctcaccaggcccaggatagagaccaggacaaatgagataatgggtgtgaaacccctaggaaccctgtcaggcaccacaccacacgtttgtgtgtgtctgagaaacctattatttctaggctgttcgggggcctctgggctgctccttttggggggctttctgacccctggccggagccagcatcctcactcaacactggctcttaactttgcctgcctgctgggtttctcttttccctgagggtctgctcttttggattcacgtgatattcttcttcccctggggctttagggaaagtatttttaagaacaggcgccrggtctcctgttgggccttgcgtttcatggtggttccccctcattccagcctgcagtttgtcccgcctggttgcgacagcagccctggcttattggtatctttctaggctgttaggttccattgaaatgtgtccttcttatactttactgtgaccagagtcccttgaaaaaattcagggcagattttcaaatggctggaagtcattactcagggaagcacagaaaggttcaaggaaggaaatcaagaatccagcacaagttagaaatactgtgttccttagcttcaaaataggaagagctcactttgagttaggtagggagagagaccgaaaaaacaccctctgtctggaatccagaaaaggcattcacaaggcatctgaatttattctctttctttctattactgaaagtcaataccttaaaaaccctgagtgctgagaaaactcactaagcctatagattcagatgaccaaggatctctgagggttcctttcatcctgcaagttttaagggctcagatcacagcaggtctggacctaagagaacccccaggttgggttacatactaaggaaaaagtaatcagttggcaagtaggttacctggctgtgctttggcactggtatttcttgatgccttgtcgtaaactcagagtgtcacgagcctggcctgctgagtggtgccagtgcaggcctccccttgactgacacatggctcccttgcctctctgagtcataaaacaggccaattgtgtttttcttaggggactgtgacccatggggacagtctagcatggtgcttggcacaaagtccaaagccgtctccaagacgcagctgcatcactgcctgcccctagcatggttagtccttccgggtaatggagagtcctgttgcttcagaaaggctkcacagaactgtgcctgtgagaccacgagaccctcaccccagcagcacgcgggcacgcagcccacagcagcatttctcatggtgccattgtgtctgaggtcccagagccaaagcctcgggaggcttggggctaaggatgtgtattttcgcacgcagcccaggtgactgtggcatgcctgcgggtttgagagttttggagcagaaggatgcctcttctggatgtggggcagcttggagtgcgcagttgttayagcgctcacaggggccgcgctcacctgcacccatccttgcctgccccgctcacttggacctgccactctcccacaggggccgcttgtctcacagtcagaatcgccagcttcagcccacccatctcgagggagagaaagggctccggggctcagtaatggttttcacaggcgggtttcatgagtggagccgctcttgttgggaagcagcttcccctgcgatttggggcatgtgctttggactttgaatttgaggctcccatttgaaaccacttttccccagccgtggcctctgcagtgttctataactcagtcttagtggctctagaggatgtctgcctatcttcttgagggggcccctaggggtccccaaatcagttgactgtgtgctccctggccgctgggcctgcaacactctgcccagctgctcttgctggctgtagttctgctcagacctcctcggcagggtggacaaggctccgtcaccatgcaggtgaccagcactcactgcacaatgaggcaactttgctgccgccttgctggacacattcctgggaaggycacaggcactcgggcctcagtgtctccatctgaaaaaggaaagcattccacaacataagtcgccaaactaaacttctggctcagatcttcccacattctttgatttgtttatcctcagaattctaacgtctctgcttcagctcacatccagctgtgctcttggtcatgccaggagatgcccccagatgctctgcttctgctgcacttcccgtctattgcagaagcatctgctcggactccatttctttctctatcccctgtgtagagatgtggagccaggagcagccaagcagccaacggcaggtcagaggggtgggcatcgcctctccctgaccggggtctggagaagggagggccaaagggtggatttaggcctcagcatgttggggagatgatgctgggggtggtagcggccagtggaggtggggaggagggcaagttccagagtgatggccagatggaatgagaagactccctgggttcaaccctggctccacctctgctggcaggtgctcctggggaggtgtcttaactgctctttgcctgagtggcctctgtaaaataggaataataataataatatacacacatccctcatggggttgccttgaggattaaatcagtcaatacacagaaagccccaagactacagcctggcgcagagcaagcatttgaacaacgttttgagtcaccaccaccaccctttttgcgatttacaggactggtgactgttatgaggtctggggacaggtccctgttcttcccaggccttgggaccagacatccaggtgggtggcagagctattcacagggatcaggaaaacagaaactggaacctcataaggaagagaagtccacccattcttcattttccgtggaggccaggagtgatgccttgatccagttccattgtccccacctgggcctgtgcatggcygtcagcacccccacaaccgccgaaggctggccctggtggcttctacggggattgctctctgttgtctttgaatcacgctgctggagaggagcttgcgtagattcccaagtttgtaattaaaacaatcgagaaacaattttcactatatataaaaaaaaaaagagctaaacagaaagtctcttttaagcagatgttgtgctgtgagccatgtagaaaaattattttatcatcaacccagctcgcctatctcaaggcttgaaagaaactaagggaacatcttttctactagcccagcgttttttagctcctaatatcatttcacatttaaaggtgacagcaatatctttaacgtttttctattggattaataacatttaatgttcaaagcaataaagcgaaatgttttcgtgagggtgctttatatcactagtggaaaatccaagtttaaaaaaaaagaccacacacacaaagtaatagacgtggagagccgtaaaccgagaaagggaacccaggcgtggaggtgggagcctgggcgtggaggtgggctcccggggtgggtgggctggtgggtgtccaaggccctgagccccgactggctggccagcgctgggagggggtcggtgcccgtgggggttgagagcatgggggccctcgcccacccgccagccattcatctccacccagcagcggaatatgacaatgttagcatttttcatttccctgacgttaccattaataaagcaatgatccaaaagaggcttcgctgagtctgtgctttatgctcccatcactcacgactagataatttcacacaggatcgttttaaaattaaatgacgataaaaacgctctgctgttctgtgttcaccagttcatagaagtctatcaagtcattaatgtgtcatgacaaactgctcgatagatacaagagtaattaattatttgaataaataacaagttgaacttggagctttgaaccacaatgacatacacatcccattaggggcgtcttggagcctccacagggcactggtacgaagagttaaaatgcaggccagggtattggaagtgatgaaaaccaatttcgtaaacacagggtaatattttacggggagatagccgaagtgtcacatttccgtgcccgcatgaggttcagtgttaaaagttccctggcagcggccattccragacaccatttgatcagagatgatttcagagaacaattatacagattttcataatcaccattaatctctgcatatttttcaagataattacagcaattattatttagatttctcttttatatgcccattgtagaaaggaacaagtgcttattataccggatagttcagagaaccttggatgagaattctttgtcatctctgcgctcgttatttcaactcatgttgcctctgaaagttcatcagctgcagaaattagaataccagcaggccctgttattaaatcttaaggttgagctgagaccatggttagagtggctggctgaattgttcatttgtgggactgctgagctcaggtgggattactgtcaggtggcaggagatgcccctgacaggtacaggcagagatgggtggccgcctcacgcccatttcccctgacaggcttacagagtgaactcacaaccaatatttagaggatacattttcgtgacatgccctttaaagattaatattagatctgaaatctgggtaattgatggcattctgcctcatagacacagcaaccagacagaaggcagctcagcacatccctgctatttccagatcaaagcgcatgtcagttcggcatcagctccgtctcacactrcaccttcygcctcatctccccactgtcctgcgggctggtccattggagctgagtcctgggccagtgggtgtggtgtgtgctgctttcaagagaagccctttcccagggaaatggttcttgacagtcctgctggttggaaacacacctctgcgtaggttggtgtgtgttctcctgcctcccgtctccaagaggcgtgagttctaaggrctcccatcctctcacatgcaccatgaggactgtcagccgcatccagctcagctagatgatacgagtagctatgtgaggggtaggaaaaccaggtattcagttttgaactgagaagtccggtatttctgcttgctataaaatgagagaaatacaaggcatagaaatgcctttttctccataaattaagttttattatgaagagatgacctggttcgaatgcactcaagtggtaccaactcacacaaaatagaagtggggtttagattgctgccgacactctgtggcaggtctctctttatttggtctatccctggccaccatggtgactcatcttttggaatcacctggtggctctaaggaggaagaagtctggggccctctcaatagcctttcccaggtggctgtcccctgaggggtcaccycccagcctgagctccaaagcttccatccccaattctctgggctctcttgagggtgctcaggtcctggggatcttggtcccactaatgaaggtcagaagatccctgtgctgtggtaccaagtgtcatattttataccattttttttaacctgtagggagtctttttgaaatcttaagcaaaatttataacaaggttatagctttccagtttgtgcagtactcaagcctactatcttcgtcactcccgtacttgggcagataagtgattaaatcatggaatccgagtaaggagtggaatgtccccgtttcacagagtcctaaagaatccccattgtgaagcagctttcttctgggcacacgactttattcactcatctgtctatcacctcatccaggccttggctactgagagttcccccacctacaggccctgggccaacagggaccatggttccctcatggagctcataatcaggggaagacatccaggcagatgatcggagcacagtcatccactaygatgggtggtagctcaggaggcagcccagggggtaacgtttctgccctttgaggagttcacaagcaggtatataggaaaggactctccaggctgatcccacagcaaggagaaaggcctatcacagatggaaggcttgactcagtagaaagtggttagcaggycagaatagctaaatcctaaagtgtagggagcagagtggcagggaggagagagcagctagggaacaaagctaggttgggatcaacctggaagggcctggactgtggcatttgacatgaccctataagctttaggagacattgaagtttttaagtaaaggaatggtacacgaggtctgcacttgaaagagaactccagtgatattgacgtgggaatatttgtcttggccatgaatggatcttctgggagagggcccggaggacactccctaacatcccttaactctgtgtggagcttgccttcactttcacaccttctcgattatattttctccacttccatcttcagatgacttcttcaggtcacatggcaaggtgttaccctctcttccttcacatrgcggaaggcagtggatttaggagatcaccgtgtccacccagctctgcccttgaccagctttgcggccctgacaagttccttcccttctgggcttcagactccttctggggggcatgggaatgccagtgccagggccattgtgaggtttatacgaaaacacctgttactcccggcgtgctttgcttcccttagacagatgctctcgtgccggtatcggcttcagacacccagagcatccaagacaccttctctcttcttgccctttggtttcaggggaggaaagggaaggcccaggacctacttttacctttgcagaccatttttgataagactttatgartagaatctgggtgagggctatagaaatcagctgtcatgtaggatggaccaacttagtgagatttatacattgcatcctcgggtttaaatccaggttctcaaaaattaccaatacatatttaatacttggggtgactcagcatttgtgagaatgaagactatcagagctggatcttaaacatcttctagcccagggcttctcaaacctagttgcacattagaatcaccggggagctttgaaacaatgctgatccccagagcccacccctcagaccaattgaatcagaacccctggggttgggggtggcaggcagcaacaatcttttcaaactcaccagtgagcaccaggatgagtcactgatctagcccaacccttttactctcagatgggggcacagacttcattgcccaaaagctgggccccctgatgccaaggccagttctcttcccatcgttacttattcaataggtttctttggatgccattatatgttagatactgttctaggagctgggggcgcagctatcatggagcttaccctttaaatgcacgagtggcctccagattggtgggggcggggggtggggggagcacattgaaactgggtccttccagcagtgtgtcaagaaagtcttagcctctgcacatcattgggatggtaatgataacaatagctaacacatgctgaacatttgttttagatgtgttatctttctgaatccttgcttcgcccctagaataatcagccccatttccagaggctgtataagtgtgtttcatgggtgcagagctagtgcctggtgggcctggcatttgaacctagggctgtctgacaccaaagccctttctgtttactgactttattctaaggcagccagtataaagatacaaagagagcagtttctggagaaatctatctgaatttcctctcaaagatgtagcccctccatcagttagtttttgttgcataacaaaccaccctaaaacttagggcttaaaccaaccaacatttagaatttctcatggttctgtgggtcagtgggtgattatgctggtctgggtcaacctggctgcagccggatggcctgagatggccccactcccttgtctgtagttggcagggtggctgctccagggatgccttacctggggatgctcgtgtttgctccacgtgatctctcaggctccaggaggcttctctgagcctgtgtacttggccgacccagcactccaaagccagggaagtctaacctggcctcacaagcgtgtttacgtctctgctggtgtcataactgctaatgtcccattcaccaaagcaagtcacatggccaagcccagattcaaggggtgaagaaatagattacacctcttgatgagagaaatgacaaatcatattgctagggggcacacatacgcggatagtgtgacatgaccgcgtaggtgacaaatggtgggatttgccaccatttttgccatctaccactgcagaccgcaccaaagaagacttccggccctgacaggtgccaggagttgttaaggaggaaaaaagtgttgtattgttgaatttatttacatacactttagagcactttctatggtgccctagagatgcatactttataattaagtaactctggtgtttgtgatcatttctattacaaattggatatcaaccctgggatagacctgtaataaccttgtgtatgccactcacttttgtgggaaatcagatttttttttttcttttgagacagggtctggctctatcgcccaggctggagtgcagtggtgcaatctcagctcactgcatcctccacctcctgtgttcaagtgatcctcctgcttcagcctcccgagtagctgggaccacaggcatgtgccaccatgcccggctaatttttggatttttttttttagtagagacagggtttcaccatgttgmccaagctggtctcgaactcctgagctcaggtgatctgcccacctcggcctsccaaagtgctggaattacagatgagagccactgcgcccagccggaaatcagatttgattgaagtaatttaaactgaacatcaccttttctggggctgtaacgtgaggactcccccgggtgttgtagatcctatcctttacttcagtatcctgtaccttgtgtaatatcccttgtctgatgttttctcataataagatctgttatgcattttggcaggaatcctcctgaggccatcgatagagtctcactctcagtgcatcctgttgggaggcccacggtgctggtgtgayccagtactggtgaagttagcttcgatcacctggcgaaggtgctgtgtagcaggtttcttcactgtaaacttactgcttttacctttgtaattagtaggtaatttgtggggaatactgtaggcctacgtgaataacttgttcctcatcagattttcacctgccacttttagcatccattgatttttwtaactctgccatttctccagtatataaggaaraggtttcccttatcctcagccagtttatttctttatattggtatggactagggtattcttactcatagttgtcattttttattttgatgctcaaatggattcatatttagccaatgggaaccccttcaggctggctctcatgcccttctgctgtgttcccatgattctttgagaacctctttactttctggcacaacaagatgttcctggccttttcccttcctgcccagcactgaatcagccacttctccaaacagctcctgtctcttttagaggagatgctagaaagcagagtctgggtatgaggagtgcccattgcctctgaactgccgttgcctcagcagagagaaatgtatgcacacatgtgtgtagagagaaatatatgtacacatatacatataagtgtacacacacacagatgtgcgcttatgtatctgtctacaactacatattaaaaccgactttataatgatacatctgattttgatccaatatcacagagtacattctgatcttcccattgtttttgccagcttggaacgttaacattcctcagctctgtcccaggtctgcctctctcaccatgttccagaatatttcatcttctctcatggtctcaattatcaccatgctggttacttccaaactcaccctcacatccccgcccgccaggcctcatttytggatctccacccggcagccctcacacacccatctcacattctcggtcataatgttctaaccagtgttgaccagttgcctccccttggctgtggcccaagcccctcaaaccagacacatgctcagcgggacccacgagttcatctctgctgcttttccgctggcccccacgccccgtcagtacctggcatttcattctcccagctctttaggccaggatcctggggtcacccttgattccgccttgcccctctgcagccagtggccaggtctsttgattcttccatctaaatgtcccttggccttccccagccactccattcttactgccrctgccctcatccgggccaccagcgtccctcgcctggttcagtgtcagaacttcctccctggtgttcctgctccagcctcactccctgtaattcattctcctctccatagccagggagacgctgttaaaacctaaatctccccatctctctctccagctcaaagaccctttggtggctccccagggacctcatgatgtccttcagtctgctgagaatggccatcaggactcctggcaggctggttcttggttgtctctggaccctacttctatgcaacagttaaaaaggctgagacacagagctctaagaattgatgtggaaacacagtcaattgaaaaaaagtaaattgcaaaacagttacttatgctgtgatgctatttttattaaaaacacgaatacatacaaaacaaaattctggccagctgtagtggctcatgcctgtaatcccagctacttgggaggctgaggcaggaagaccccttgagcccaggatttcggggctacacacagctatgatggcaccactgcacttcagcctgggtgatagagcaaaagtccatgtctaaaaaataaaaaaataatattctgtcctttttctatacatgccaacacgcaggtgaatgcatgggagacaggccggcaggaccccaggcactgtgtacagaccactaccaaggcttgctctgagaagggtccagggatcagcggctccggattcaaggggtgctttgacttagctatcctattggaatggtttccttagaaaatatattcatgtgctgaagtgttaaagagtacaacttaaaaatatagatgggttggttttgagaaggtaaaaagagccctggcagagaaagtgcgtcttccaagcctgaggttccctgctccacaaccgaggggtgtatgtgatgctcagcctgggggacaggcgtgctcygtagtcacaggccatgcctgtcaggcccttgctgtcagttaccccccgtggctgcagatcacactgcctgttttagagcatgccttcttccagaggatgtggtcgctactagtggtaacgtatctgcaytggaccttgggtctgctttttgttctgcatctacaaagctcctttggtctcgagctcactgaggagtttctgcgtttgtcgctgtgggcagcaggtgtgtgcactgacccagtggcccctcagccaccagggtacctttgaactcatgtggaaaagtatcactgagttgcgttttatctttaccttgagcaaaatgcagttgatccctgccccaagccattaaatatttataacgttaaaaaaatgtttctttaatgtctctgagcctctcttttctaaactgtggaagaaagacaataacaatacctggactgctatgatgtttaaatgagataaaaacataaggccctaggtacaaactagctgctcagtaactgttagccactggtattagtattagtgagtattagtgttattactgycgtacagaggaaaataccctttcgcggtagacccctttctgcctgctttcccataaaaacaggagtgcagccatattaaattacataacccaggggctgtgagtcccaacccaaagacgtttggagggacaaaagcaatgtttgctgaggagtaactcattgggtcccccagaycatggctctccgtggtgtctgctatctctggtgttgcaagtcaagctcgacttggaagcaagatccaagcttctgaggctcagtgagaatgttcttgttgtgtgtcgagtttcttgtgggtgtggactgtggggcagctgccttccctctgtgctcccatagctttcagagaactgccctggacctgcatgaggttgtgcagcccagcactgcaccctggaccctggagggagggactgccctgaaggaggaggtgggggggctggtggccctagattcctcccagggcactagggatgcagagggatgaagcgagcccctcaattacagtcttctgtgtagagatggggagcctaggaggagtcagtgctctgtgtgtgtgtgtgtgtgtgtgtgtgtgtgtaatccagattgctcatgccaaatagaacctctaagaatgttcgtttgtggtgtgagggcaccctggtctgggtgcccaatgagtgactccttagcaaacattgcttccgtcccaccaaacgtctttggattgggtctcacagcccatggattgtgtaatttaatatggctgcacttacgttcttatgtgaaagcaggtagaaaaaggtcaaccgtgaaagggtatttccctctgtacagcagtaataacactaacactaatacgaatggctaacagttactgagcagttcgttcgtacctagggctttatgtttttatcttgtttgaatgtcattgcagtccaggtattattattttctctcttctacagctgaggaaagagaggctcagagagattaaatacttgtcccaaattacagaactagttagaagtggggcctggtctaaactcatttcctgcagaaacagctgctttcgacataaaaccgcagccttgccccattttctcagtggctgctgtggtcaggctgttctttcctgttgctgtytgatccctcagcggtgctgcggagtgggcacaattatcctcatatgacagatgaaaatctgactctgaggytaagtgacttgcccaaagccatacggccaacaagcactgggcccagctcggcgttcacacgtgtctgactccggcgcctgtgctccgtcctcccgtgctgcctctcacgcgggggactcgggaggctccggcagtggctgataaatcactccttttggcttatgaataacatggcaaaacaaattactytggggatctagaaggaagttgttggccctgtgtaaactcaattggaatgtcactgagcagacagctctggaggcatctacaaatatcttccaaggaatatccccaaagtgaaatcaccaagaaagcaaaacaggctccgtgttttggtttgcaaatgagttttgagaaatggccttgagatcttgagttgttggcgttttccccattacaaattgtaaaggacttttgaaacgccacaggaaaggggmgaagaaaggcttagggttgctgattatttacagctccaagccccgggcaggtacacagaattaaaggcctcccaccactccaattgcatttaattttattccgaaaatgactacctgccaataagcctcattgttcaccagcatctctgcaagtactttgaggtactattacccgagttcacttaacaccgcttgacaactttaagcagataacaattgaggtgctggtaatagagtctgktttttttttttaatttttacatttttaccacatgactttatgactctctttatcaagcrtgttgaaattaatccatgtgttgattggagtatttcctcacccctgctgtgtattgagacgttggggasggataagggttggcggctctgagcagctaggtattccggggcaatgggtggtcctaagtccggagccttgggagttggtcagtggtgggtttgtgttgagcctgcagaagtctgaggtgtgtgtttggaggggagaatcaaggratggctctggaggactgccttggcaggtaaaattatagttcccatatgaagggaggatgcaggagctataatcccatctcgttgccaggcaaagttcctacagattcatggcagagctgtctgtgcaagcaggaatccaattttatgtccaaacaaatgcagcatgcagattggactgactgcttccccgagaatagcaaagacaggcattcaggtcagctggcaaaaaaaaaaaaaacccaccaccccctttttcctcctttaaaatagggggtgggattaatacagtagcagattagagctttatttgtttaaaccttgtagaatctgtaagcattcacaatccccttgacttgtagtgcctgattgtaaaaagaacagttgaatgagctcattgttttctggtttttttctttaatgtattttacaaacactctggtgacaggcctgacatgctgatttctatgtactggcacttcagtttgggattacagcattaataacagagttccatgcatcatgccatttttaagcatgatcgttrtgataaagggcatatacttaattacaggcctgcttaattacagctctgttgaagctcgtttgtttaggagaatgctaattgcgccacagagccagcggcacatccttgctttcatctgctggaggtagctcgatgctgtggatcagcattttgttaaaactgccaccaaaaataaaaaaaaaatttaaaaacaagaagaagaagaaagcactggcctagtactgaaaggaaacctgccccagcacatggcttttggtaagagcagaagccagggttaggtgaccagccctccctacgtggtgggtgctttatctctgtcgtcttatttcatttttcttcaccctcaccacagcccgcagaggcagctgtagtattatgcccaccttacagacagggcaagtaaggctcagagaggtggggtggcctgtgcaacagctgcacatctgcacctgctgagctgcagcaaaaactcaggtctgccaagctcccagcccctccttccctgccatagccccccatagccccagagcaggttacactctgggtttgaatcctggctccagccaagcctcataactcctctaagccttgcaagtggtgtattagttcattcttgcgttactataaagaaatacctgagactgggtaatttataagaaaaggtttaattgactcatggttctgcaggctgtacaggaagcatggcagcatctgcttctggggagccctcaggaagcttccaatcatagtggaggcaaatccagaacaggctcatcacatggccagagcaggaacaagaatgccagagcaggaacaagaaagccaaagagcggaaggtgccacacgcctttaaacaaccagatctcgcgaggactcactcgctatcacaaggacagcaccacggggaagctgctaaaccatccacaagaaatcctctccccacatagctcagtcatctcccgccgggccccctccaataccggggattacaattgaacatgagatttgggtatttgggtggggacacagattcaagccacgttaagtggtaatgttgaggcttgagttatttgatgcctgttcaccaccttgtgtatgggcagtaagcacggattccctttccttttctattttgtagaactgggcttggggagaacttctttacctcccaggtttgttgggggtggggggctttgtcatggcacactgagagctccagggcctggagagagggccactttgtacctgggtgccgtctttggctctgccaaggaaagggtaggtgctgtccctgcatctaggttgtgagtgcagactggtcaggcagcgtggggggatgaagccccatccaagcccttaggctgcatggaaggggcaggtcaggggtgaaaatgtgtgtctcgttcccagctctgcctccatccagctcctcgaacagcatgtcaccctgcatgggactcagaaatagactaaatgctagaacatcacagtctctctgctctaaaataataacaaagacaaaatgctagttgcagctagggaaaaagaaaggaagraagtaaacgtggctccccaggagaagccaggacggagatgattcatgaacattcttttggaatgcatgaagaatgcatgccgttgattttaagaattatgttttgcaaacctctagatgttttaaaatatgaaaaggctgcccagatgagaggagacatggatgttacagaattaagaggggatttagcagtcccacagatcagctttctacccaacacacaaaatccctccctagctccccagcaagtcgctgtctgcgtctagccccttatgctgtgaccaccatgaaaacatgtgcagacatttgattatgttcacctcaagtcttctcttatctgaaccgccacttttgctgcagttctcatgtgctggacaccatactgggctctgagggtgctgggcagggtgctaggatgaacagaaatggacaggattgtgccttcctgggccatcgaacctgatggctgcttctcctttccctcacatggtctggcttcaggttccctcaccactctggcctccttgaaggcccccgggatgaccctctgggaaggtggttctggctctgagcgccccactcaagctccaagtagaccagggtgagtgactcatccgggcaccaggactgcggcactgtaaccttatgatgctccgtttaaatagtcagatcacgtcattgacttactcacctacagccgccttctttcctgtctcctgctgttattccacgcctcttccattccatccaacacagttgggttttcggacctacactacgagactcttcatgggtctctagtgaactccttccattacatttggcccacgatcacaactttttgagactttactggttttcactctgttatctggtttgtagactgcccacctcggcttcccatcaggcgtgcattagatgagcataccctgtgtgtcttcatttgagtcattgatcatgccctgggcacccttcacaggggtcacttaargttagcattggtctcttaatcagcttcttgaatgtgtggttcaaccagttatggattctgctaacctccacagtagccagctgtatttatccatcttgtgtacatggataacatgagaaaatttgtaagatgctttgctgaaatccatattatttcagcctgctttaatctttgatatactagattttctaaaataagtgggatttggtgggcagattatctgcttagcagagtcttgctggtcctggtggcacttgcttctctttggagcctccctgtgctggtgagaagggcactgtgagagccccgctcctctygattcagctcccactgtgagcttcagcccatgggatcctatcacctcctctttctttcctctgagtttgttaaaatctgttttctaggccatgtgtggtggctcacacctgtaatcccaacactttgggaagtcgggctgggaaagtcacttgaggccagaagttcaagaccagcctggacagcctggacagtgagacccccatctctacaaaaaataaaartctattttctagaagaacatagggagcatctgactatgcccctccttctgtcgtgaactctcagacggtggtggtctgtcctgaggctcccgtctctgtcacttgaccagacagctcctccttgcagttaggattaggtcagagcaggtctcctcatctctgctgctggtccagtcaggagcacatgggccgaggggtggagcgaggccgtcaaagtcctgagggccccccttgctgctgcatcttgctcctcagacatttcaggaatgcgtcttccttccctcccagtggctgctgtgcggcatcccgcaatggtctcacatctcatctttgcctcctcactaaggtgttaccgctgagcctgcctgagggccagaaggtgccctcacccaggcacctcaatgcctgcatgtggagcaggttggccatgggccccaccaactccccagggtgccccagaaggtctgggagggagggcttcacctctggagggcagatgtgaggagggcctgcagacaaacgggaagtgcctctgagggacttcagggcccactgggaggtggggtgagcaccctgcccgctccctgcagtctctcagtggctaagggagggccttgtcctaatcatatgtgggtgtgtgtatgcatatgcatacgtatgcacttataatggaaatatataatttataccttacatattatatatacaaaatgtagaatctgccggtcgyggtggctcacgcctgtaatcccaagactttgggaggctgaggcgggcggatcacaaggtcaggagatcgagaccatcctggctaacacggtgaaaccctgtatctactaaaaatacaaaaaaattagccgggcatggtggcgggtgcctgtagtcccagctactcgggaggctgaggcaggagaatgacgtgaacccaggaggaggagcttgcagtgagccaagattgcgccactgcactccagcctgggagacagagcgagactccatctcaaaaaaaaraaaaaaaaaaaatgtaaatctataatctatgtaaaggtatatttttacataatatatgtgatatatatatatttgtgtgttaggctgttcttatgttgctataaaggaatacctgagactgggtcattgataaagaacagagattgaattggctcttggcccacggttctacaggctgtgcaggaatcatggcactggcatctgcttctcgggaagccccaggaagcttccagtcatggtggaaggtgaagggggaacaggcgtatcacatggccagagcaggagtgagagagagggccaggggaggtgccaygcacttaaccagatcttgtgagaatcactcactaccgtgagaacagcaccaagccatgagggatccacctccatgacccaaacacctcccaccaggtctcgatctccaacattggggattacattttaacatgagacttgtcagggacatatatctaaactatgtcaatatatgtacaaaaaatgctattgttgatatctaagttttacaagtgtatagtccattttcatactgctatgaagaaatacctaagacttcataatttataaagaaagagaggtttaatggactcacagttccacatggctggggacacctcacaatcatggcagaaggcaaaggaggagcaaaggcatgccttacatggcagcaggcaagagagcatgtgcaggggaaactcccctttataaaaccatcagatctcatgagacttattcactctcatgagaatagcatggcaaaaacccgcccccatgattcaattacctcccactggctccctcccacaactcgtggggattataggagctacaattcaagatgatatttgggcggggacatagctaaactatatcaacaagttacttttttatccttgatttttatttaaagccctaaactcagagcagccagcctgggcaacccattcttcctcatctcctctgctgactagcaaggcaagagcgcagcgtgacaggaggcctggctactgtagtcagaaagccaggcttacgggaccacctatgtttctagatccttctctttcaaagacgtgatcatcagttggaaggagaaagaaacacacgctccttgtgggagcagggagaaactgcttcatgggtgaggggtttggctttggagcgatggaaatattttggaactagatggaggtgatgatcrcacaccattgtgaatgttctaaatgccactgaattgttcactttaaaatggttaattttatatgaattttttaaaacatttccctccctgcttagatcttcctagttcctagaagtgattcccaggcttcttccatccatggctttcatctccagcagcagcaggcgggggtagcagtgagcagggtccccaggtcctgagagagttaggcacttgccccaggctggagccctctacccagttccccagatccccgtgcatgggaacagcagccctccctgtccagcacagcccctgagcccccaggccctgcccctgggctggggacctggaatgcagaggtgactcgcacatgcacctacaataagaggagaggagacacgggcctggccagaccccagggaggacctcggggaaggcatgctgcaggagaggcactcagaagactgggaaggacagttgaggtacaagcatagagggagggaagggatgggtaagccgggaagagggtcaggtgcaaggggccagggccttcaatgccagtcgagacccccatcttggaaatcctgcccttctctgtccattggaggcacaggcagtactgacagcctctgactagggaggcctcccatgggaggagcccccttcctctctgccacccccagtacttctcagccccctcagttcctgatgtaatcaggtctttgcacatcaccttaccaccttcgtaacacacaggatccctagacatacagtgacatgtagatagaaacaactgtcaccagtgagaggcagttcttcactcccaaatactaataaggtctttaaaacatcagaggcagaaagtctggggaatgaatggtgagtgggttctgcaggggagcaattgccagggcctgtgcacagtacctgggcgtgcagagaggactctgctgtggaccctgctgtctgtctagcaggcaagagaagctgtggaagagatggatgtgggcagagagtgggaagtgaggaccatgacaggtgaagagtgggcttcgggactttactggggaggtcaagtagcctgtactatccagagctttggggccactgctgcctacctttgtgaccccagcaagcaccgacttctcagagcctctrcttcccaatctctaaaatgatcggaagtgttacgagtgcccggcccatctcagcagcactaggaagggcatggaagtcaggtcaggcagatggtggtgggagctggcacacctcttcctggatatccggtgggacttgactctgcccttctctagaaggctttgtggctcttccagactcctttattcattgctgaactttttcatctgtgaagcagcatacacgcataggtacttagagttcacacacaggtctgcacgcgggatgtactgaacgagattgaggcccaaatgcgggacgtactgartgagattgtttggggccttcccctcaccccactttctggggaagtgttgcctgttcgggacttttgtcccatctcttccgtcagctcacagcaggttgccagcaccacctgaaatgggagaagscctctgaccaggagtctctgtctaagtccagcagccacactgggcagcggcccttccaagagaggagggcgcggggaatgcagcgactgccgccacctgtgctgtgtctttttcttcatgctgatccaagaaggtttcgtttctttccttccctaaaataaagygtgagcagagttctatgatgttttatccctgtatgaacgtagcatgagccattcggcttttcttgctgattgggaggatccgttccaggttttttcytctcttatgtcctttcctcttgctttgctgctttctgcttctgctactcttctgtgttaggactgagaaaraaaaaatatgaccactgaaggttccagagaagtcatcattccaggagacactgggggaagcaaagattgttggtcccaggagcgcactgcccgacgctgcccccatgctctaccttgcttccattgtgctcactcygtttctccctgaaaccacaatttactgcatagccaccacctcagggtgcggccacccctgacttcggggctccgcgtccctgcactcatgaccaggcccctaacaactgcggctgcatgttcccgactcttcccagacctaagggagaagccaacactggaaaggcccctaccactgtcccagcagccgcatggctgccacgttggctctgtgaatgccggcatcacgtctcgtccagtgtgacctgttcctcaatgtggcaggatttccagtcctggtgtggcaccagagtcctcctctctgaggttataattcatagagaagtgctcacttacggaggcacaccctgggtcrtttctgtccgtgtgcttttgaaagcgatcccctgggacagggcggagggaggggtggccacagaaaaggaaccaggcccctggtttctccatcgttgcgtccccgttccatgccctttttctcgtgtcctgttaaaattgagcacactggtgagcctctagtcagcccttgatgccctgggtctgagtgactgagagcgacagccactgttgcccccacatgccaagcacctgctctgtgccagcgctggccaggtgccccacacactccacttctgatgcacaggcaccctgtcatgtaggtggcgccatctttttaaatgtgacttcagtttttcgtctttcaacttcagttgctcatctgcagtcaccagctgggatttgaacccagccaatctgactcctgagctcctctttcctcccacttagtcttttcccctgagtccaacagcaccttagagcatgtctaatgcacgtgcttactgccttcatctcattgcagcctgtccctgccagctgtgtcaccttcatcctgctgccagcccctggtgactctcccgttacagatcagagaccagactccaggggtggagagtaggggttctggaccagcygctctctgctcctagagctcttgtctacacaactgcctggtgctcaggggatgacgaggcgcctgcctctctcagtaggttgtgtgtcctggcagcaggggtgggacctgtcctctttcatagctccagcacatctgtgctggatgtcacctggctccatccagtgacggattcatattctctgtttcgacatcttcagttgctggacaactaaatgccatcttcaatacctttaatgccatctttttttttcttcttttgcagcaatggatggtgtgccttttatgatttcagagaagttttcttgtgttccagaaagtgtaagttttatgcatgatcgcccttcccctctgccaccccccagcctgaggtccctccatcctgatttacacagcacgcagggctgttctggcagtactcacgccccttcccctaccggaatcttgtccgcctgcgtgtcctctctcccactggaagctgaaccctgcaacccagtgacaggaactcctgaggttggggggtgggtcgtgtgcatctctggccctatcagccagtgccccatgtagtaggtgtttgagaaatgaagaaaacaacagctgggggatgggaaagtagcaagaggctgtcagacaagctcaggtgcactgagcctttgccatgccgcacgtgattaacctgacctgagcttccctggttgtgaatgttctttgtctcccaagtccaacttagtaagttttgttctttcttacttaaggatgacaatttcctgtagaaaggaggctgcctcgttttcccattgtcatagctgcattctgcgctctgacacggaggccgccatgcaaatgtggtgcctctagctgtggtctcctgcccatgccagtccagcatggacccaaccatccacatcagcactctcacgcaggccaggctcacgccatctttttatcagagggaccgagtgagctggccgggaccaaaggccaacttcagactgtgaggggcggccaccctgcatggcagtggggtctctgcctctcactgctagggtcagccctccaatggcgccagcccccaagrtggcagtggccccctcccagctgcgcaggcttgccccacgctggctcagcaaacccgtttctggttttgatcctttcygcagaagttggccttgactagctaataaacatgaaggccccagcttgggcacagctaaagaatcctttagtgtttttcttggatccagcttaaaaccacccggcttgcgatttgacctgctctgtagtttccattttcgtgaaatagaataggcctcctctgaacccttctggtaagcagcttaatcttgaaaaatgctcgtgatgtgacatgcggagctccaggaacttcagccgactccacggggccgcgttgccatggcgacgctggcgcctctgccgccgttccctgggagaggcagctctgtcctgctcaccagctccagttgggagaatttagtggggtggttagagcctaatgacacagcagctgcacctctgctgggtcgcrggcaggcggccccgctctcgcacccctcgttttggcagcacagagagcaccacactgttccgtggctaccggcagagcagccgcgagcggaacgtgtgactcggtggccccgtcccaagatcgccctcgcgaatgtgctgctgccgggcgctgccacctcggccagggctccaaggacacatacccagccaggcccggtgccctgcgctccctgctcttctcagtgcagcgccccgcagccccactacgggggccgccgcttttaatggacgagggaatgaggaagggatttaacccgcagctgcatcgccaggaggcgctgagactggttttgagtctgggtcctcagactccagagctggcctcacaggaaacccctgctrgcttygcggaggctccagctccmctcccatccctgagctgccgcccttcaggaccatgcgggccctggggttctgtcgaaggccctcaggtttagccttggccccaggaggctgggccagggacccttctggggagcacagaacactcatgtgcccagtagggactcagaccaggagccacatggactggacgccctctgccctccgagcctctgagtccaggcttctatgggcctctagctcactcaactgccatgtgtatttgatttttcatgctgtctgttgaaaagccagcatttttttaagtctccaatcttcatgaaattataaaaactctcattaaaatgcaatgttatcattttttccacatcgatttctcaaatgataattgatgggcagttgtttcatttacctggcatttccaaagacctggaatccccccagctcctaccctggattccccctaaggaactcttcctccctggagttccttaaacctcctgccttacccagacacagtggctgggcggcctccggggagagcttgggcacctccggtttatagctgcagcgagaaagagcaaaccttgcctgcgtgttctgctggcagggtgagaagacaggtgaagcaggccagccacggtcagtcctccaggagacctggatccccctgggtgccacagaccacaactaggcaaaggtcccrcagcacaggggccagcaccttgagggccacattcctgcagcaggctctatcatcacttctcctgccacccccacgcgtgaccgagagtcccactgactgtcttcctgtggaaagtgggtagagaaacgctagatcacaccgtggcttgaggtgttaccaytgtcatgcataaaagtaagtgtgggaggagcattttccagctatttaaaagggcaacttcatctgtgttttcagatgcagccctttgatctcctgggaatcaccatcaaatctctagcagaaatcgaaaaagaggtaagcaagccatcaggggaggggagggcaggcctgggccatcgcctgcacaccggcgtctctcgtgtgttcccctagggatccactccaagagagggacaggtggaggtgttccgttctcttctgagaaaaacactttcgttgcacccaaatgtgtttcttagataaagtaactmaattctaatgtatttcctacttccagtcaaatatgacccacatcttgtcttctctaagtcagaatgttttacatgacagacagagcctcagttctccttttttaaaagaagtctcagctttgggaaggtggaggttggaggacaggcaccaggttgacttttcttcctccatttgttttgttttattatttgccaccaggaggggtttcgggaaatgaccaagcgtctccacaatttaggggcaggtcagggtaccttccactgtgcttcatgaggtcagggtaccttccactgtgcttcatgaggtcagggtaccttccactgtgcttcatgaggtcagggtaccttccactgtgcttcatgaggtcagggtaccttccactgtgcttcatgaggtcagggtaccttccactgtgcttcatgaggtcagggtaccttccactgtgcttcatgaggtcagggtaccttccactgtgcttcatgaggtcagggtaccttccactgtgcttcatgaggtcagggtaccttccactgtgcttcatgaggtcagggtacttccactgtgcttcatgaggtcagggtaccttccactgtgcttcatgaggtcagggtaccttccactgtgcttcatgaggtcagggtacttccactgtgcttcatgaggtcagggtaccttccactgtgcttcatgaggtcagggtaccttccactgtgcttcatgaggtcagggtaccgtccactgtgcttcatgaggtcagggtaccttccactgtgcttcatgaggtcagggtacttccactgtgcttcatgaggtcagggtaccgtccactgtgcttcatgaggtcagggtaccttccactgtgcttcatgaggtcagggtaccttccactgtgcttcataagctggaacacatctggcagcctgctttcaaacagttcacacattttcctaataaaaaagaaagaaacccaggactggcatgcggatgataactctgaagaaagggagttgagtcagaccaccagggccctcctgtttccctaagacagcacggggtgtgtggcttctcttctgtagagcgggtggttaagcagtcacacgccacagccagctctcctccgagaggaacattcatctcaaagatggaaatggtagaaccatttcaatattctccattccttggggttttctcttgtgtacccagctagcagaagccggctgcattattgaaagatggctgaaatcaagcaaaattgaatcaatgtagtacaacaaatttctaaacctgtcatagcaaaaacaagacaaaaaagtccccctttgtctttgattttcagtaaatcataaaaaccaacctgattgtcatatatagatttttttttctttttttgataactcagggaaaaaatggctggctgggacattagaaacataggtgtgcataaaatttcacacctgcccttctcaaagcaggggagctgtgggtggctgtgaagtccacctgcttatggacagcccatttgcatggggccctgcgtgtggtgcagcccagggtatgtgaggaaggcctcagaggagctgctgctgccacaggtggtcaccagggcagaggttacactgacatacctccagaccagcccgctccactgtggacaggggcaagtcacatacctgctgtttaccatggggtcacggcagaacctgtctcacggggtgctttgtgatgccaaatggatataggtgggacgtgctggcagcagcggcctcagcgtcgagccatctcccctcccgttctgctccggcctgcctgtgggcctaatggtggcaccgtttaagcacctgctgtgtgctcagcctggggcctgaggctttccatacgtgatcactggttcctaccccaggcctcattcctccctgtgtcgtggggagaaatggagactccgagaggtggagtaactggccaaagacaaggtggagacccagtgtgtcgtgctccaagtcctccccactgtgacggaaagtggcagctctgtgtccttccaagggggctctctaggctggtggccagtcagtctagttccttaacctgggtgggccttcgagttgctggggtggggtgaagtgggtgacggtcccagtgtggggtccagggcgggtggtgggaaccctgcaaaccttattctcttccccactctaaggactgaaatctgtgattcattacaatgtagtgtctcaatgtcgggcgctccgagtcacagtgtggccacccccaggaggtgcagagccaggggttggggcacaccccggagtcagtgcctggctagaatctcagatcttccactgacttttctgagccaacatttctttttctgcacgatcaggatagtaataatagtgcttagtccagagtctatgtgggtttaactgcaaaggtccagtgaatggcctgaaccagtgcctgcctcagtgctgctggctgccactgtyatcacagccaccaccgtcaccatcgttaccgttctccttgtccacagagaagggcgtgagtcggcacaggcccacccattccactgtcccgctgctctgttgctggggctgaaagctccatccctgtggaccaaggtcagctgtatttcttgggtttagtgacgggttaaaagaaaaacaggtctgggccaggtgtggtggcttacgcctgtaatcccagcactttggaaggctgaggcaagcagatcacctgaggtcaggagtttgagaccagcctggccaacatggtaaaactttgtctctgctaaaaacacacacacaaaaatagccaggcttggtggagcacacctgtagtcccagctactcaggcggctgaagcagatagaaatcacttgagcccaggagacggaggttgcagtgagccgagattgcaccattgcattccggcctgggccacagggcgagactccgtctcaaaaaaaaaaaaaaaaataacaaaacaggtctgtatttgctattgaagtaaattaaagtcgatgtaaagaaatgtgggggaatggggagaggttagaaccttaaacagggtagaaaaccataacaagtatcgctgcagtggagagctccacagagtttttcatttaacctgaggacttaaaagttccttataccagccattggcatgcacagccattcgcgtaacgttgatgtccacacactctggccaacgggctccttccgcagccgtggcaaaggcttttctccgtaaataaacctgaagttgcttcttttagccactgaactcggcattgctcgtgggagttgggggctcagggagaagtggtgcctggagccagaacgactggctgtcactcttggactctgcaggtttggccctggagtgggctgtgttccctgggtcgggatgagtttgattttgtgccttccatttataacaggtctggctgcccttagtgaggggcttgkgggtggagaagtctctgctcagaaatttgctttgctcactgtaaacctttgtgttttataccattaaaccaaaaaaaaaaaaaaatagagtaaatacaagtgggagactgctttcaggttcaggggcayagacctttgaccgtgcctcccgctcgtccagaacatctccccaggctcgcccacgattcccagacagggtggagagcctggcatccagggagaggctgctctgtgctgggcaggtgcttcccttcaggatccctctgcaccmygtgggaggaaggggggtccacccatttacggaagtctggactcaagaagttaagtgactggccagattcccacagcagcaacccagagctgaacaggggtctgagtgtgaccctggctgaatacatgaccgtcttcatctactgaagagtggtcccaacttgaagggaaatagaagtgtgagccctgaggcagcactgtcctgtccttccagaactgcagccagtgtccctcctgccagcgttaactgtcctcaccatgccctgcctgagggatgtttctgaatcgaagccgaagcacagttgccaccattcggcttcagggacggtcaccctccaacaaaccgtgtgaccctgtgtattctgagcatggaggttagggacrtgggcagccacagggagctccccagagctagccaagcagagctgcctccacccccacaaggacacagatggcctggcctaggagctgcccagcactgattgacaaacagggtgtcacttggttgtgggtgggtgtccctcagcccccagcatcctgaggagccccagggagcatgcgctcctgggcccggacagccaggctgccctggagaactggaaggggaatgagcccattcagatgccggtgtctgcagggaccctcatgggctgtgtaggcagtggacaggacacagcctcccagtgtggatgcctggggtaggggacaaatttgctgtataggcttggccctggggcatgttcccaggccccctcaccccaaagtggaacacaggcctgctcatcccagcccagcgygccacacagcgcggcagtcagggcacctggcagctggtggagcgtggttagatgtagctgccctgctcttcaccagggtctccccaagagtcgtggtacctgatgcacttgggtgaaatttcatgaaaaatgcccaaggacggtcatgttttaaagttagaatcartggatgcgccattgagcaaattttgaagraaaggatctgtggaaagacagaaaacctctcacgattcagacatgctccatgatggcgcgggtggctgaaartgaaggaagccgtgattcatagagaaattccaactcaaacgccgtcmccctgctggctccccatgacagagcagtggccttctgcctggccatcttccagcagccatgtgctcctgccacctccgtcacctcgcacccagagcaggggctttgctgtcctcccagggcccgcatacatgagtcccaggcatgaggaagtgaatttttacctcatcgtccstcagccagggaggtgaccaggggctggtcagtggcagcctcgtggccaccgtgggcagttttcttgtcccggccccacctgtccgtgccttgtcccctcccctccagtttggctctgcaggagggcagtgggtgacccggtggggctgttgtcccagtgaagcccttacggttctccagacaaaaggctgtctgtgtcccagagcctggaaagtgtaatttcgcagccagcgcccatgatgaagcatcttctctgggcgtgaggagatgggtgtataaatattctctgtctctgccgctctttatttccctggtaagcagttgccccatttctctagctgatggattccccatcgcaaccagggtgggagctgcctggctctgcagtccaggcgggagcttctaaaataatcctcatgtcttgattacctgtgtatcctccctccccacccacggtcccgccctggcatccgtggaagacctcaccatcccggtcaggaggcagcagccttgggtgtaggtttcatgctgtgtgcttaactacccgcaagccttgtgagaacargagtgaaccattcctgtaatgacagggcaccgggcagtggagaagtccggagcgacttccagccccatgcggagccgtttctatcagctgccaacctcagcagaaaccacagtgctccccgttcccttccaggagtgccaccatcaaaaccgcggcggaggaagcacacattagcctgccgcactcctggcggagcracagcctccattttcattcgactttaaagccgaaagatgagggagggtctaattagtaaagggatgctctaatattaatcacccgcttaaaattgacaagggaggcagttcatttaaccacttaattgccacaggtttttatgggctgctgtttgcagacatatttaatgaagaagttataaatctaagggagcttacarttttaattttatacctaaatattttccttgttctcatgtttgtagtcagtcctcaagagtgtagtcacgtggaatgttctttaaatgaacatatttgctaactggcgtgatttcagtttttaaaacactggttccagcaattaggcatttttttcagttcccaaatgactagagaaatccgtcttgattataattgctcttagccacgcatatctaatttgtgtctttttaagtgttaattagtaaacagtttgagctgacatctttatgtgtttgtgcgttgaaaaatggggcttattgcttatttagcttggggccgattccactagcatttacgtcacgacactgaggtggaattaatgaaaatgcatttggcagcatgaggtraaaaggatttttgaattcaacttttagacgtccgcattgcgtgggcttctgcgggtctcttcaaatatacgaggttagcgtagatttgggacctatgtcccgcaggaataaagtgaagcagatttttgtatcaataatgaaatggcagcgtcccaattttataaaagcaaaatgttcctattcccgcacaattgttcattctttctacttttggaaagctttcctggtgcttattagatgttgaagaattttgtggcgcgaactggtgcagcctgaaaaatgtgcggtccctttgcaccatctagtggtaggatcttaaactgcagcaggaaataaggtgccttttctctgcctatgagattcaatatttcaccgcccagaatccttgttatttctttatttttctgttagaaagctgaaatgtttggggaaataaatctgcctacttcagatattaaaagttagataaataaaaagaaaccaacctagtctgctccctttaatatattgctaaaagacacaaaactatcacccaaattcctacagagctgtcacactgagctaattccagcccaaaacaaagaaacctaacgaattagtaaagtagatgccttgcagaaatcatgagagaagtctgaggcttcttttcaaatacaggatatagcttgggaccaccgcttcatagactctacaagcgtctgaccacagcgcaggaatcagttttatgccacagacaagattaattatcttcccataaattgttgaggttcttttgggcagtttatcattctaagcagctcccctgccgatcaaaattgattttttaaatatttagtgtttcctgagtaccaaggttgtccatgtttataaaaatgcaaacattacaggaacatgtaaaaggtgaacctccccctccgtccactcctgcggcacgtgmacacacacacacacacacgctcagcaggctcatgcagtactgccrgctgcgacctgcctctgtactatctagtatgtcttacacgtcttcgcatgttcctttacagatcagccttaccctttttaatgactatatgttgttcccttttatgattatgccataatttatctaaccaatccactattgactgacttttgaggtgcttccaattattcacaattacaccgctgcaatagatttccttgtacatgttgcctggctcscctgggtctttccctggaagaggatgtatgttaccatttgccttttgaacagggcggggctattggaagtcccaccagtggtgcctgaggggacctttcctcacatccttattctagctaagactcactgggaccttaatgtgcccctccatttaatttttaatctctgcttattttggccaggtgcagtggctcacgcctgtaatcctcacactttgggaggccaaggtgggaggatcacttgggcctaggagtttgaaactaggctggacaacatagcaccaccccatcgctacaaaaataaaaaaattatccaggcacagtggctcatgcctttcttcccagctactcaggaggaggctgatgtgggaggatcacttgagcccaggaagttgaggctgcagtgagctatgattgtgccactgcactccagcctgggtgacagagagagaccctgtctcttaaaacaaaaaacaatttggccactcttcaagttgaacaacttttcaggtgcttatgagccactgtgttctcacgcgagcgtcttctgctcgctctctgctcagttgttttctatcagcttctgtagcttttgcattgattttaaagagctctttacgttttaaagagagcaaacttttctctatgagttcaaatacacacactttaatcagtgtcttttcagcttgtaaatgatgtgttctgctatacaaaagtttcaaaatgttcrtgggcaattttctctgtttatttgggctttgtgtcatagttagattatgaaaacattcacccctrttttcccttattattttatatattaaaatattaaatacttttcaactacttaatccatctgaaatttattagaaggtaagaactacagacagctttattttaccctaaaacattagccggttttcttaatgttggcgatctttctttgactcttaaatgccacttttatcatatgtaagtggatcagtggatgtttttcttgattccgttctgctctgttattctatttttatattagtaccacactattctgaatcttatcgctttatagtaagttttaatataggttagggttagttctctcttttttcccccagaactttactaattttactcacaggactattcttccagttgaactttagaatcttgggggcgaaggaagttccraaaagcccactctcgatttttattggaactgcattgagcacatggttgaacagaatagtaatcggaatcttagatcaagcgtctctccatccagaaacaagggatgcctcttgtaagcccaggtcttggtcctttctctttaggtcattcctaggtgctttctgtctttgtggttcttgtgaacgagatcttttttctcattctattttctgccacttatatgtaaagcaaccattgacttttgtgtaatatttctggagctagatatccctctggcttcttttactgtttctgatggctttccagctgcatttcatcggttccccaggcaggcagttacgtcgcctgtgaatgctgaggcctccatcctggcaaggtcgttcctcttcctgtgtgccattgtccgacacctcggcagggacttgcaggtccccaggcctccttatgtcatccgtattttaaatggaagtttgtagtttcaatattaacccatagtgctgcgttttgacttgctatttatagacattgttttttttttccttcatgttaaagtgttagccatctatttctgttttcctaaatgtttttatcagaaatggatggtggcttttgacaaatatctttgaatcatccattgagatgatcatattttttctccccaagcatattaatacggtggattgtattaatagagttcctaattccaagagtcttggaggcccccttccccactgcccttttgggtcttctcggcagccagtgtcctggcagccaccaccaccacacatcttgttcccgtggtggcccaaggcattcatcatatgaataagagaaccaggctgagcctgcagaaataaagtgaagcagagattacgtttgccaggcagaaccacctgccctggttaccgccatgagtcatacccgctcatgcagaattgaagtcaaggtgaacatctcgccttttgcatgtccttcagaggaggattttcctacccttttcttatggtctctgggaacttttgcacctctagttttaggtaaagtaatgcctacaaagatgaacaagtggaaagctacctggcatgtatgtaaaaataagcatcaagacaaagggtggggagggcaccttttcagagcacctcacggctctcattttccacccagtaaccagtggtggcaatcagtgtggttttaaatctcttctacaaactatctagaagaggagaaatacaaagactcactttttaggtggtattcaggtgaattctaaaatgctgactcagtgaccagggagcaccccacccccccccagggttgtttgcagacaccaaaatagcatttaggccrggcccggtggctcacacctgtaatcccagccctttgccaaaccaaggtgggtggatcrctggagcccatgagtttgagatcagtctggacaacatggtaaaaccccatctctacaaaaaatacacaaattagccaggtgtggtggtgcatgcctgtagtcccagctactggggaggccaaggtgtgaggatcacttgagcccaggaggtcaaggctgcagtaagctgagatcgagccactgcactccagcctgggtaacagagtgagatcctgtctcaaaaaaaaaaaaaaatgagagagagagaaagaagagaagggaaatagcatttattcagtggccagggcatctgayggtgcacagccctgcccagagcctccacccagagcagcacagctggacacccaggtgccacagggagggaagggttggggagagcgaggcgagagcaagtcatggttttgtctttgttcgtcatgcagccgtcttcatttccaccacaaaatgtgctttctcccatttttgttttgaaatacatagttttctctatctttcattttcctacttttaatagtcacaagtacgagaaacgttttgctttcttgcttgctctgcccccatcatcctatacatgcacacacaagacacagtcactgtggtgagatggcagtggacactcttcccagctgggcgccgtgtagggagtgcggggtactgtggcaaactggagagcacaggcctctggaaaggaggtcacctccacccaccacccacctgtgagactgagggtttactgggtgagaatgagggtctggaattgtatctccctatgtttttttcaataacatctagataaatattggcatcctatgcaaagtctttccacttttcagtgtttatgactattgtgaaacaccgcacaggccagcactgtgtgaacctgcagcttgtacactgtctgcatagagaaacagaccaaatcactagacttagactcattttcatcatccacaggtgtgacatgctgctgtggatgggccctgggcttggtacttgacatgcatgagttactgtaccatgggatgggctgtcactcagtcatgcccaggggccccagggctgtgcaggcacagtgctgctgctacaaggactagaaaccaggatgaccttctacctgcccaagaactgagcccctaaactagctgctttctctcctttgcattgagctatgcccagagcctgatgtgtctcttcactcaccatcgacttgtccacccacccacccacctacccacccgtccatccacccacccatccatacacccacttacccaaccatccatccacctacccatcgccccacccacccttccacccatccatacacctacccatcaccccacccacccttccacccatccacatattaacccattcactcatgcacctgcccatccactcagccactacctatccacccatacccacccactcactcacccacccattcatctactcacccactcccccacccacccaccgctacccacccactgttcactcattcctgcattcattctaggctgtgatctctactgggctctggagctacagctgaggctccacagctgccctgagcatgagragggtatagaaagtgttgttgtggtccgttctccccggggaaggaacacgcttcccagagcaagtgcccctttagtggtccttaaggacacgtaggactttgccacttgagggaggargagtgttcctgacagaactggctgggagaggagagagaaccatgcaggggaaagacctctccccaggatgtggggctcagggctctgcatcagggtggggagctgggartcacttgccctgctcctggacacaggccagatcctgggtggaaggtgttttgtgagatagggtgccctgaaggtgagggcgctctccaggcccctgtcccccaggggacaggcagcctagggcagggtgtccctcagagacagactctcagcgttgtcatcacccagtgggagacccaggcttggaggagacaggaggggctgggtaccgatgaggattgacagaatgactgggatgcggactagtagagaggaagagactggactggcagatggccatgcatttattcagtgacccgggctgggtgctgtgctgggcagtgaggacacagcagtgcccagacacacaggcttctgcttctggagctcttagctccagggagcaggggctgaactggctggaagtggggggccctagaaccacatggaaccagcggggcccttattgcaccccctggtttagggtgagaccccccagctggatctggggttccctgctcctgggttgcagctcccaggttagagctcatgaaccatctgggcgggctgttaggaaaacagaagtagcttcctaaagggtctgcgggagccctcacccacccctctgcccacgccccgcagtgtggtcattgaaggcctctcccagctgtgccctgaccccgaggccttggtcaggtggtgcagcctcatgggacctcggctcactccccagtagtggcaaggaggttctgtcctgccagactactcggctccccactcctgaccacaggggtcacagccctgagctccaggcccagctacagggcctcgctttcaaagagagcattgaacaaggaatccacctcatctccggggcatgaggtgagcatcctggcttctccctacccccaaggcccacctgctcgtgaacagccttcctcctagtgaagcactttctcacgctttctggagctggggcttcccgctgggtatgcagcctctccaatgtctctagaaccatggcccaagtaggaagcaaggacttyagctggccctgcagctgctggaagaagacgtgcagggtttccaaaccgaacagttgctcagagtcacctggggtccttgtcaaaacgcccacacccactgaagtactgcctggggaggggmcctggaatatggctcagaaagcagcrggcggcccaccctcgtctcgcrgaagaggcctgcaggatggggccgtggggccctgaaggcctctcccgggactgcagcgcttcaggcctcgccwtatgacktgggcactgtgctgggccctgcctctctcctcccgcagcgtttcagaagccagggctgcattcctcatcttcaggaaacagatgaggacgtggagcccctcatgtgaggaagctgaggctttaggattttagaaacaggaagagcctgtatcatagccgaggccgtgggagtgcctgagatggagggggatgactggagtgctgagccgggggggcttggagaagcagacaggtggggctgctgtacagaatctcccccacctctccctgcctgtgctagggccaggcccatccgcctgcccaagcccacccatcagtgtctgtccacccctgcaccagactcttctcgttggccccagccttggcccctttggttccctcccacctgtcctcacctggcccagcccctgccctctggactacaccattcctggccctatcgtgattcacccgtgagctcactagttcatgtctgtcggtctggcccccatgctggagttgcaccccaggagaggtaggtgccaatgcctgccctaatgcaggtttcccagccagcccagcgcctgccccctgcgcctctctgggcccaggcctcgtccagcattgcccagctcactctgggacctcaggaagtcagatcctttcttgggcttcactttccttctctgcaaagctcgggtgctgggaacagccccttactgccttttctcgtctggagccctctagagtgtttagtatgagacctggtgtgggaaggagggaggaggctggaggggcagtgcacttgccttcccctctggtgattagtgcaattaatactgaaatcacctgagtgttttcaaaaaatgctggtgtccccgtgccggttaaaccaggaccactcctgccaaccacaggtgggggccatgcatcactgtggttaaagcctttggttctgatgcataaccagggctaattctcttcactttcaaggcacttgcacacgaatcgtcctagttgtgggtagaccagtaggttctattgccccctctttgcctcgaagctgggtgctttccaggtgctgctggaagctgcagttggcaccttctatcacaggacactgacctcactatgagaaaaggcttttagaagctgagactctcgcaccgtggcctgagacgcctgcttccatcagtggcagggtccccgggacccctggcagagcctccaggacccctggcagaacccctgacagttacatctctttcccgagagaggcctcaggcccgggctgcccagctgctgcagtggcggcctgtgcccaccagagggcgcaggcccggcgctgcgcagctggaccgggctgtgcggaccaaatgctttttaattgaaaatttttttaattcaaaaaggatttgctgtttgttcgcaagtgcaggttttccttatgcaggagactaatgtcttgagtaaacagatccgggtccaaatccaccttcaaaggtactcgctgtttgcccaagggagtgaaagggcttccagaagcggccccgtctcctgggtaaacacggcgggaggagcgggcagggaccgcgtctgcgggaaggcggccgcagccagaggggattatgtcgcgggacatatgttgaaatttcatttggggagttagggaaaacaagaagcgggggtgggtggcgcttttctccagccaagataacctaaaaagggaaaaaatcccgagggagagagggtgggggcgcaatctgtgcgccctcgcggggaccggcgtggtgcaggcaggaaggggcgccttctccgccctcccccagcccgcgggccgggagagaggagctcagcccagcccggagggcccagccatgccctccccgtgaccctgtccccactcctggccacagagactgggacagcggcacagggtccccacgacagcccctctgccgaatcagccagttgctcacacaggcgtggaagcgtcctgctcccccgctcaccatccagaaagctcccgctaggcccgggcctaggctctctggctgtggacactcgggctggggctgcaatcgcccttaacctgctctctctggccggccagccctcagcactccctgccacccccaggaacccggcccagtagatacagcaagacctactgaaggagcagaagggcgcggcccaggacgcctcccccagcccctccactgccctgcaggaacctggctctgggctttctccctctatcatctgagatgcttcgcgtttgcaggcatctccctggcatggccttggagcatccaaagtggagcacctccaagccatgtcccaccccctcccccaaccagtccttccccagctcctttctgcacagcgtgtggtctctggcccttccctctctgcccatccatgtccacacccattcccaggttccagtgattgggtcgtagaattctctaaactgatccccagaccagcagcatggggttacctgggagctatttgaaatgcagattctcaggcctggccccagacctacccagtcagaatctgcatttgaccgggaccccccggggactggtgtgcgttcagagttgaaaagcctgctgcatgttctctcctgagccggggctgatggcctaactatccacgccgtaggccctcagccccgctgtctccgcaggcatgtgtgcccgtggcactctcctctgcaccttggcacctattgccctaggtgccgtccatgcccttccccagtcaggccccgaatctgctttcaagatgtgaatgccccctgccccgcgaagccctccttgctctctccggtgatccccacgccccgtgcatgtgccctcggaggtggccttcatgctgggctgtgctgggcatgcccgccccctcctctgctaccttgggagtcccgcgcagggcggatgtcagtgagggctgatgaagccagccagggaatgaatttgccgctgttccctgccgtgcatgtgcccaggcggccaccaggtggcagtgtcctcccagactttggcgcagctccccctcctcagcctcccggagccggagtctcctgaccgcggcctgtgcctggtggttggcgagcaggaaagtgagagggctggagtgagagagctggcgctgcatggtgggttctctggagcaaccagatgctcagtgatcgcttgctcagtgctagggcgcggcgggccctgatctaccatcgctcattccatcctccaggcaggcctggacatgggcgcatcaccccacctgagagatgagttcactgagggcaggagaggagaggagcctgcctgagtagccctgaagcctcgggtccttacctctgcaccctgccaggcagcagatgctgtgaacagggctcccttcggtttgggggccacatgtctgctcagcccaccgtgcacacggggacagagccagcctcagccccagctgagactcgggtctgtccatctgtcccgggtcagcctggggactgtggagcagtggcagccatggacatagtgctgggctttggctgtggacatggcgctagtctgtggccatggacgtggtgctgggctgtgacttgctggctgccacagcctccccaccagttttccactttaagggaaaaaggcctcccatgctccttcatggttggatggcttttgggccccactgtgcccctgaaggctcagccctgcggccctcctcgctcatcagggcccttgggagggctccttgctgcaggcggctcgctctgggcagcagggagggctgggcaggcctggaaagccgcctgctggtgggcagggcgtgggcaccccagggccctccctggggctgggtgcagtgctccgcctcctgctggggcgatgtgacccctgccgtgttcctgagggcctcccttcctggcctgcccgtgtacaggtgtcccccaaggagctgcagctcatggtcagctcacccatagggcagctccacttccacctgctgtctgcaggggagcccttcttatgacaattctactgctaaaacttttcaaataaatacttcaaatgcttgaaaaccactgatctaatctaagctcctgcttcctaaaatccatgtgaccatgaggctgccttgacgcagggttccaggccattccccataccccacccagccccaacgccttgcacctgtgtccggccaggcagctgccagcccatttctgtggctggggtgccccgtgcctgctctgcccacatgccctgccttatgtttgggcaccgagacctcacctggcctcttaagtgaactacaggtgctcctagccccctcagaggtacttaaccccttctctaaatttccatcagacttggaacgcgatttagtgagccagggtcggttaggtgagctggggtctctggcgtgaggcttaactcctgcccccagacaggggagcagcagggctgagccgtggaggaaggtccccccmccgggcagctgccctggccccgctgtggcctgtcaggagtcctcagcaggggtgcctctgaggactctgtgaggaatgcatggggagggtgtggatggtgccagggacagcagtggaggcccctcccatgaccctgggcaccacctggtattggtccttgcttcagcggagccagcatatcagggktccctagagcctggcagctgagaccagcctcagccaggtttggggttgagaatctaccctcaccagcaggggcatgaaaactgtcccgctgggtgggaggccatgacagtcagcacgggcctggcagatgggcggcaccgtggttttacacactgctggtgccaggcctggcctcacagggagcaggcaggcactgtggagggtaccagtcatcaccacaggagcctgtcacccccgcaggcgtgtccaygcacacacgccrcatgcacagttcaggggcccacgagggcaggctctggctggcaccggcctggccagctgcgcyatgtcaagatgccccacgaggcggcccaggcctctgcctgatcttgatctgaggctgtggagrggtttccctagtgtcccatggactgactgtgtctctctgtccccacccgcccctgcagtacgagtacagcttccgcacagagcagagcgcagccgccaggctyccgcccagccccaccaggtgtcagcagatcccgcagtcctgaggagccagcggccacctgcggggagaccaccgccgcccagactactgacggcaggggctgctgcccccgmctcctcctgccgcctccgccagccctccctcccacactgccccagcagggctggcccggagactgggcagctaagtgggcgcatcctgtcttcagctggcctsactgacaccccggcctccctggggacrttgttcataaccatgactaatctgtgtgtgctgtagtgaccagcggctcctaacstgtctgtgtgatgaccagttgtcctccaaaaacctcactcaccacggagtcaccctgagggccccgggcagttgccctggccgcccagtgacgcccacyggctccctccgctccctcctgtcacctaccagggcagaccccactaagccgttgagtctcttcctggaagaccctgagggccggcagctttgcctaggactctccagggtcgctgatcctccccggcccagggctgccaggaacaagttcctctctgcaggatctcacagcagccctgagaagacatgggaggaagaagccagtggccctggggtggaccctgccctttggacatcccatggacytgtcacccagtcgcctggaagtcggggagcagcacccctgcccccrgtggaggggttgttgctttctggggaggaggacggttgacggccctgcttggatccaccaccaggacrctgtgctcggccatggcgcgcctcccccaagggctcatctgtgcaacaaccacatgccaacaatagctccaggtgcctcagccccgtgccctgacccggggaccacagggacaccctctgagacgtgctggccccaggaggatacaggcacacgggcacccagcccctctcagagccaggcgtgtcttgacggtatctgctgacgggaacaagtcattctgaaaggtccctctgacccaggtcaccaaatttgggccagaactggcacttccgagtgcccactggtgctggcgtcctcaaagtgccgggcgccaagttcagccccaggtgcgtttgcctaggcagtggtggctgccatccctcggggcccaggccctcacccgaagggctgcctcactctgtggtgtcaggcactgggctgtgtcctgattcctcagagtatggggacctgacatctttgggtccccaagagttggctcttggatgtggaggcttgatgctgcggttgggggctgcactacctgcgtccgtggaagcctctgcctcagcggggacggcctcctgctgcaggtcctgggcagcccacagtagtgctagctgaggcccagaggaacgggaggaaagggaggcagcgccggacggcgcagctggccaagaggcgggcggggccagaaatacctcatgcccctgcaccagcccctccgtctccaggccccaggcctctttgtggacccatcttcctcctctgccaccccgatcttcactcggatacctcttgatttctgtggataagggaagcggccacttctccctccctgagacccgaggatgcccctggtgggggtggccttctcaggactcctgggtggcacagcagcaggaccttgtcatgggactgatgctgagcagggagggggctgccaggctggctgccgatgctccgttcacataagccagtgtggttctggggacctgaggagccctgtggcacccacagggggcacctatgtctgccgtggctcctcgggtggtgccctgtgtgacaaagcccaacagcaagggtgactcctggcaggtgggggcagcaggagggcagagggcagagctctggccacttctgcccacttcattagggtttgtgaactttgtccttcacctcttttcgtgccctggttgtgagattgcctctaacaggtaatgccaggggcccttcactccgcccccatgactgggaagaggcctgtggcagcgccgctggaccctaggaggctcagaggcagtggtgtgggagccctgtctgcaaggacgcagaataagcagtgagggcggctgcaggagaggaaggggctcccacagcccccactgatgccgctgcaggcccctgtcgagctggggtcccagccaggtgcccccgcatgccctcctgcagttgctggatggatagggacaccaggaagaggacaaactgcatggactcaagcgagctggagccatcttctccatagcattacggacttagcataagagtaaatgactgtgaacgttgtagtaaacggcagcttaagataagtaagcagagacagtgttaaggacgagttggtgtctgtggtagcttttaggctgctcctaacccaccatttattgccttctgagaggtgggtgaggacaagcatgtgcctgtgtgtgtgtgtgtgtgtgtgtgtatatgtgtgtgtgtgcacgcacatgcgtgtgtataagcccacctgagtggggctcgtgcaggagaactgaggcatgaaactctggctcaaacctaggaattgagagcgtttctgtcttttgggagagtacttttctccacgagccctctggccactgtgggagggaaggacaagggttcccttggaaatgtgaagggtcttggcctcatccctcaggtccccccacagcacttcccactactgcttctgtccctgctggcagcctctgtccctccagaacggctaaccagagcacactgtccccaccgcctcccctttctctctggaaagttgaagtatctccaaaggccttggaaatggcacaaaggtgataaggagcaggtgctttgctgcagtctcccttgcaaatgtataattaaggcctttcttcccaccccaagtccaagaacaaatgccagccacgtcctccgccacttggagagatgagaacccagtggggtcacgtaaaggaattgcaggtcggtgagaggacaagagggactcccatgttctaagcacctgttcctggccaggctctaggccaggctctctaagcacatttctcctttcattccccctaaaaacagagtgacctggaagtagatgttctttgctccttgtcagagttgaagaggctgacttggcccactgctaagcggcagaggcagggccagccatcctgtcgcaagcccgtgctggggctgccctttctgtttccagtccagttacggacttcccggccgccactgggccctgccggtcaccaggccactgtgcagtgggcgcagagcatggtcaggagtggcctgcccgtactcctccacccagatgagggccctccagagcctgcaggcatctgtggggaatcccagcctgcaggttcttggagaagcaggtgaacctaaggatgaaagcaaaggagggccttgaggaagcagcccccaggcctggcagccacgcagcggctgagctcatgaacttggttcgcagcctgccttgcccctggaggccacgccaggcgctcacccctgagcccacagcccctgcttgggctgcctggcaccctcagggtggcccggcctcctcctgccactctgagcacatgtccgggggttgccaccagagacggctttgttctcccagctaaggccgtggagctgctgtgtgactgtgtcaggcctggacaaggaagacccttagggatgacgtccccgctgcatatttattcaaggtgactcttgtacttggcaagggaagtccactgtgtgattgtctgtattcttaatataatttgttaaataaacgtttgttttaacctctttccccagtttgctgtcgtggtgtctgaaggcagcagaggtcagtatccctcagggcaagccccaagctctctctcccccagcagggctcttgtcaccacctggcctgtcagccttctagaaaggactggtgggcttctttgccccttgcttagttgagacgacctggttacaagtcagtgggattccgggggatgcagaaagccccgctgttatctggtggcagccctcggggtgctcctggaaggagaaaagccccagttggcgtgaaggcaggagcagctcctgccaggtggccccggtggggagggccggggtgctcggtgcctttcacctccgactccccccagagcccttgtctgggggcgcagaccacgtcggagtctgggtggtttcaatcctgtcccgactgctcacctgcttgtgagaggccactccagacaccagctaaggaggctgcagggcccaggaacaggcgcagcgctccttgtgaggagccggcagttcaggtttcaccatcaaagctctttgcctcctcttagcatgctctgtgcgtctgggccagacaccagtctgcctgcagcccgttcacaccggactcgggcaggaaggagctggagcacagccaccttagctcagcgctcacctcaggggcaccagccccgcctcctccacatcccagacccctgctccgggatgtctcaggtctttgtcccacagtaggagaggaaaagcagcccggaggatcccataagagacccgtggtgcagatagaacagctgatgctgggttccagcgtgggccttgccacttcctgaccacgtggccttcgacaggtcacctgcaccctgtatctgtccaaagcgacacagttcccctccctcaatggcttgccctgggaagatggaatgaggacccaggcagggcatttagcacacagcagagacatttagcacgcacgtgccaggtctttctgggggggccttgattctatgttactgtccacaaaacgtacagagtccctcctctatgctgggtctggagacaccaaggaagtacaggtggtggtctttggtatcgaggacaaggcctcaagtactgcttggaaagacagagcaatgcccagggccccagggctgcaaggagctgaaatctactacactggcctaagccaaggcagtagtgaccagcccaggaggaggcccatggtgcccaaggcaggtgcagcccagcctcagagggccagcctggcagcccctgttcatcctctgcacttcccacgggccccatggcacctgagccgacgtctccccctgcgcttccagctgctggttcccagcctgaccaccatctcaaccctaacgttccggggctttctcttcccatctgcgtccccgccggcagctccctgcagcctttctctgtgcttagctctgtcgctggtcagtcactccaagctccagccacatagttccagcagccacctagaggtgtccatgtggaggtcccatactcacgttgacctcagcacatgccgagctgaatgaaccatcctatctcaagccctaaacggcccctcctcctccaaccctcccatctctgggatagctccaccatctccccctagagttagccacggcccccacctggagccctttgggatcgctccatctgcagctggacagttctgtcatctaactgttttcaaacccggccactacattctcttgttgctgctgtggtattatcagttctggcctcaagccctctcaattggatcgcagcatcagcctcctagccacacctgcctcccacatcaccctgtcccctgtcattcatcccccacacagcccagatccagccaacaggactcctccacttactctgccctcatcaccctaggaatgaatgctgagtccccaccattctgtgcccctccctcctgggcctggctcacctcccactgatgcccctgctgaattatttgcagcttcccaaacccttacctctcatatgcctccctacctttgcacatgctattccctctgcctagaatgcttttctcccatttttctacctggaaaactcctactcatccttcaagaccctgttcctgcacctcctctgtgatgtccatccggatgtcttggaggcaaaggtaatcaatgattctcctgttcaagctgcctgtgccttgcacaggggaccacatgtcgctgcattgcagccacctgtacctctcattagattatgtgctcctggaagaaggggtccatgtctctttttttttttttttttttttttttttttttttttttgaggtagagtctcactctgtcgcctaggctagagtgcagtggcgcaatctcggctcactgcaacatccgcctcccgggttcaagcgattcttcttctgcctcagcctcccaagtagctgggactacagacacccaccaccacacctggctaatttttgtatttttagtagagatggggtttcaccatattggccaggctgacctcaaactcctgacctggtgatccacctgcctcagcctcccaaagtgctgggattacaggcgtgagccaccacgtccagccccatgtctcatttattatgccctcccccaccattgtatacccagagtgcccagcacaggcctggaaaaatggtggacatcagcaaatgctctctgaatgaattccttacactggatgaagtagacagatgaactagactcaattgctgaggagccccagaaggacagacaccagcaatacagggcctgtgatgcccagcggcaggcctccctggacacaccccgatgctggccccagagagatcagacaaggatatgaaagctgagccttgtctggttcatctccgaagctgcaggacccaacacggggcctggctgcaagctggcatcagtccatggtgatgatggtgggacaggaaggtgaactgccaccggctgctgtgtctctttctagaacccagctctgggggatgtcagagaaagggaggaggtagatgggtcacaagacccaacactaaaatggccaggggcttggatctcagggactggagaacttcagagataagttgattccaaatagatatggataatgcacataaaaaaaaattaggagcatggcttgcttcatgaacatgggcatcagaagcctcaataaagtctttttttttttttttttttgagatggagtttatctcttgttgcctaggctggagtgcattggcgtgatctcggctcactgcatgcaacctccgcctcctgggtttaagcaattctgcagcctcagcctcctgagtagctaggatttcaggtgcctgccacctcatctagctaattttgtatttttagtagagatttaccatgttggccaggctgttctcgaactcctgacctcacgtgatccacccgccttggcctcccaaagtgctgggattacaagcatgagccactgtgcctggccaagaagcctcaataaagtcttgagcagagtgaaaggtggttgggtgcctagacgacagatggcagaggtcagttttctggctatgcccattcatcccttccacgttgccctaggtgggtcattttcatccatttgcaggttggggaggggtgtcagcagagggcagcacaggcgggcagctgcctggccctgagccccctcctcccctcgccccacaccttgggtcatgttgctgcagagacacaggtcttgggaatggtggtgcgggggcagaggtctgggaaggccctgagggctggactcctgatggggagggcacatgggcagaggttggcacagtttggaacacccaagacacatccatccccagctcctcatccttctctggagcgggcacagggttctcaacttcagctgcacattagaaccttctgagagtgggttagaattcctgtgcccagacccacacccagaccaatcaaacaagaatctctctctgcaggagggaccaaggagtcagtagtgttcaagcttcccaggtgatttcaatgtgcagctgagagtaagaactcaattctggccggactcggtggctcacgcctgtgatcccagcactttgggaagctgaggcgggtggatcacgaggtcaggagttcaagaccagcctggccaagatggtgaaaccccatctctactaaaaatacaaaaattagccgggcacagtggcaggtgcctgtaatcccagctactcgggaggctgaggcaggagaattgcttgaacccaggaagcagaggttgcagtgagccgagattgcaccactgtactctagcctgggcaacagagcaagactccatctcaaaaaaaaaaaaaaaaaaaaaaaaacaacaacaactcaattctgagctttcaccacttccccagttacatgttaccagccagtggagctgagtcccagggaactatgaattcccaggggcaggtggaagaacagacatcagaagagctcatccacccagggaagacaaaaagctgagcaacccacaccagcagaagcagaagtcatagaccagccagagcatgagttaaatataaacaaaaggcatcctccaagagatgtgggaggaccctgggaacattgggcagggagaagttgtttggaataagagcctgtcagttttgaaatactgacagacctagagagacaaaaacagataagccagtaattgcacttgaagattttaacacacctctctcagaaactgtagtcaaattgccaaaatatgagcaaagatataaaatgtttgaataacctgattaacaagcagagaactttcaacctggcatagatcccatatcctttcagaatcaactaagaactaagccactaaacaaacctcaataatttccaaagagccaacgtcatatctaaaaccatctctgatcatacaatgaaaaaataagaaatgtaaagcaaaatgatagctttttaaaaccacacatgattggaaaatgcactacaattaaataagaggaagccataagggaaattattaacatcttagaggaaaataataatgaaatcactacatatcaaaatttgtgggaggccaagcatggtggttcacatgtactgtaatcccagtactccaggaggccaaggcaggaggatcagttgaggccaggagtttgagaccagcctgggcaacatagtgagatcctgtctctacaaaaaaattcaaaaaaaaaaaaatagccaggcatggtggtgtgctcctgtagtaccagctacttggaaggctgaggcaggaggactgcttaagcccaggagttttaggttacagtgagctatgattgcaccactgcactccactctcctggatgacagaaaccccatctctaaaaaataaaaataaaaaaattgtgggacacgattgaaacggtagacaatgaaatttacagtttaaatttatccaaaagcaagaaagattgaacataaacaagctacgcttttaactgaagaagataggaaaagagcaacaagtaagtgcaaagaaataggaaataatgataaaaagaatcgatgaaatcaagcaaacagaaattatgaacaaagtcaaaatttggttctttgaaaagactaaaagagacaaacttcagacaaggagaaagaagaggcaaataagaattaaaacaaaagataactgcagatataacagttaacaggaatattattagtaaccatgtattaattaccatatatctggaaaaatataaaatgtcaaaattggtataagaaaactaaataccctggcacagtggctcacacctgtaatcccgacactttgggaggctgaggtgggtggatcacctgaggttgggagttcgagaccagcttgaccaacatggagaaaccccgtctctactaaaaatacaaaattagctgggcgtggtggccatgcctgtaatccccgctactcgggaggctaaggcaggagaatcgcttgaacr

SEQ ID NO: 6803 - DNA, 38425 bp, Homo sapiens
  misc_feature (1)...(38425): n = A,T,C or G, or insertion/deletion polymorphism (see Tables 1-2)
gctcacacctgtaatcccagcactttgggaggccgaggtggggagatcacctgaggtcaggagttcaagaccagcctggacaacatggtgaaaccccgtctctactaaaaatacaaaaattagccgggggaggtggtgcaggcctgtaatcccagctactcgggaggctgaggcaggagaatcacgtgaacccaggaggcggaggttacagtgagctgagatcacaccactgcactccagcctgggcaacaaagcgagactctgtcttaaaaataaaaataaagataaaaataggctgggcgcagtggctcacgcctgtaatcccagcactttgggaggccgaggcaggtggatcacgaggtcaggagatggagaccatcctggctaacacagtgaaaccctgtctctactaaactacaaaaaattagccgggtgtggtggcacgcgcctgtagtcccagctactccggaggctgaggcaggagaatggagtgaacctgggaggtggagcttgcagtgagccgagatggcgcccctgcactccagcctgggcgacagagccagactccgtctcaaaaataaataaataaataaataaataaataaataagtaaataaataaaaataaatgaagtccttaggtgggtgacaggcacacagtaggcactcaggaataacagctgtggtggtttttaatagctcggacagatggaaatagtttggtatgatggggaagcacgggtggagtactactagcagctgcatatagagcccttaaaaaatgactcctacaaaccaccactgcactagccacactcctcccacccggccctgycaaacaaaactaaacaaaacaaactaaagcctttgaaaaatcgccttggctctttgggcctctgatttccacctggtctgtcccaggagctgtatctttcacagtggtctttgccgggaccctctgtaaccagtgggattatgctgccgccaccagcaccaccgagaacccgaggtggggaggggatttgcagactgygccaggtgcagcctggctttggaaacaagggccgcattcctggaattctggctgggagatccgcccagcttggcctgacccaaactggtgcctgcatggcttctgggcacgcgcagctgagctcccagcaccacctgggggaagaggggggccgtccccggggacaccctggcctggagtggagtggaaggtggggcaggcagacagtcatagggacttttaagcaagtttaacaggtttaaatcccaacaggaagtggaagagaacatgccaccattcattcattgtgagggtctttattgagcacctgctgtgtgtccctcctggcaggcaccgaggtggacasggtgtccctctctcatgagcccacagtagcgagggaggtggacaagggagcggcccctggtgagggtcaggatgctggcaaggatggaggggccttaaggaagggacaacccaggcgatcaaccatccggatttctttgggattgaggggctgccaggggcagggactccggttctggaactggggctgtgccagtcaaagtggagtgttgtcactgcagacaggggcaatctagaggggccaccttagaggatggccaggggagtggacgtgatgaatggagaacgaggctggtgggaaggagaacggagtggaaggagagaatttgacacaaggaagaaaccacacagtccgtgtcaacaagatgggctcctctgtctaccctgctctttctgtaccagggagctaaggccgggggaagaagagaaggacagtggtatagtgaggactggaagtggctttctggatacctgggttgagcgtggccaatcagcataaagctgtcaggtgaaggcccacagggccctgatgggcccctgcggagatcctggggatgggggatggtgacatgaatcccccaactggctgtcctggcatagttaccaggggaaaaggaatttaacataaaatcccactgacctgggctggcagggagccataggatctccaggcagcagcaacagctccctgcacagtggccaggttgaggtggcccacaagcctggaaatctggtcagcagctccgggaaaccctgggtcctgggcattgccccgtccctcggcttcctccaccttcccgaatcaactgccatcggaatccgctgccccccaaagctctgggctggccatgaaggggccagtgcttccgggctgcctgcttcgaggacaccagcactcctgccacgggccattcgtccatcgctgccagtggccctccctctcagggttcggcagtccactgtccccgaggaaatactagttactaggtgacgacacggttcctaaaacaggctggtgttctgcattcagccctgctgcaacctcagagccgtgctgcctgctcctgatcccagaggtgccgtctctgaagaggccacccctggaagcactgtcctgcctagagtcagggctcacttccctggttgtgcccactagctgtgggtccttgggcagcttctcaacctctctgagccttggtttcctcattgtaaaaaggagataataaaggcatcacgtcacaggcttgttgggagggtgcaaggaggtactaaatgtgacaaactgaatacagtgttgggtgcacaagtgctcctcagtgctacatgtcactcccaacctcctgggccaagtgcccagagtgctgtgatgagggtcagactcaactcagccagacccaggggacactgacccaggaattacaatggaagatgttttcactgtggaggagctgggggccggaagacttgccacgtttagggaggcccaagtggacactggctggttgggggtgccctggggaggagagactggtggagggacctgggccagcggggagggtggccagcaggcctggactgttgggctgatcagagatccttgagtgcaggtggggagaaaccttctagaaatgtttgtttgtttatttatgagacagagtctcgctctgttgccaggctggagtgcagtggtgcaatctcagctcactgcaacctccacctcctgggttcaagtgattctcctgcctcagcctcccgagtagctgggactacaggcacccatcaccatgcctggctaatnnnnnnnnnnnnnnnnnnnnnnnnnnnnnnnnnnnnnnnnnnnnnnnnnnnnnnnnnnnnnnnnnnnnnnnnnnnnnnnnnnnnnnnnnnnnnnnnnnnnnnnnnnnnnnnnnnnnnnnnnnnnnnnnnnnnnnnnnnnnnnnnnnnnnnnnnnnnnnnnnnnnnnnnnnnnnnnnnnnnnnnnnnnnnnnnnnnnnnnnnnnnnnnnnnnnnnnnnnnnnnnnnnnnnnnnnnnnnnnnnnnnnnnctgcctgctcctgatcccagaggtgccgtctctgaagaggccacccctggaagcactgtcctgcctagagtcagggctcacttccctggttgtgcccactagctgtgggtccttgggcagcttctcaacctctctgagccttggtttcctcattgtaaaaaggagataataaaggcatcacgtcacaggcttgttgggagggtgcaaggaggtactaaatgtgacaaactgaatacagtgttgggtgcacaagtgctcctcagtgctacatgtcacccccaacctcctgggccaagtgcccagagtgctgtgatgagggtcagactcaactcagccagacccaggggacactgacccaggaattacaatggaagatgttttcactgtggaggagctgggggccggaagacttgccacgtttagggaggcccaagtggacactggctggttgggggtgccctggggaggagagactggtggagggacctgggccagcggggagggtggccagcaggcctggactgttgggctgatcagagatccttgagtgcaggtggggagaaaccttctagaaatgtttgtttgtttatttatttatttatgagacagagtctcgctctgttgccaggctggagtgcaatggtgcgatctcggctcactgcaacctctttcctgggttccagcgattctccttgcctcagcctcagcctcaggtgatcccgacctcaggtgatccactcgcctcagcctcccaaagtgctgggattacaggcgtgagccgccgcgcccggccggattttctcatttttactagaaggttctatctcctgggggtggggtgaggtggtgagaccaattcacctggaagtggaagctgggaacttggtttgagttctgagggttctggggtctcgccccttatcttgctttgcctggagggctgaagggctggaaatacttttgttttggggctggaaccaggactgcagtttgggagccggtgctaggttggaagaggaggcggggtctggtaagcactttagccgaattgagcagtgggaattagggaattgagggcagtgggaagctggttctgagttttaaactggggagtgacagatcagagctggatttttaggagtttctctgtttggaggtttagaaaagacccaggtgggaggtagggctggggtggggagggagagaagtggacgatctgagagctgaggtggggtggaaggagagcagcgtgtcacgggctcgggattccggcccaggcggccaggtggacggagataaagatgcgcttcttcatccgaactgggtttgctaacctgtgactgtcaccactccatgctccagggcacctggcccaagggatccggcctcttgggcacacaaatccatatggagccctgaaggaccagacagggaccttgccttctctgtgtccttcctgggaaggggactccagaccaactgccagtcttccggttccacctctctgacaaccgctcacctcaccctccttggcatttttatttcaaatgctctatccctttgtttgcatgggttcctgtgtcatattctgtgttcccatttttaattggagaataagggactgtatgttattctacccacaggcctagctgaggggatagggaggccatgcctacctccaaggctctaagaagtgaagcaggcggcgagaatgtgcagtcgttgaggccagaggaccgggcctcagcttctccttaagcccctgagtcctcctctggggaccacccccttgtacctggaggtgaaaatgcccgcccaggagggaagggctggcccccggagagcccgctgcgaagtgagtttgcgcactgcggagcgggcgcgggtgactccagagcggccctgccagtccgcggggctggcggggagcaggttcgtgcaccgcgggctctgtgcatgcagaggcgggaagagcccccagcccggcagccggccccgcgggaaggcgcagcccgggcttccgaaccctgtgaacgcgcaggttcctggtcttccagatgggcaggaatcgtcctgcccgcccggggtgggaggccacatgggggcactgcgcccgggcgcggccccaggtgctttccaaatgcccactgccgctctcatccgtaccagcgatgatcaagaaggggcctggtcgcccggggaggtgccccggcccgaatcgactccggagacaacgccgggcgacgccacctgcgcaggtcccggagggccgctggtgtctgtgtacagggcgtgctgtctgtggaaacgcgagggcacactagcactttcctgtatgtattattatacttcagtttttaggaagtgcattagaagggcctgcaccagtcaaattcggggattaaagcttttaagcgggaagcgcgcgccccgtgctgtccctttaaagcgttgggccggcccgaggcattctggccgctgtcgctgcccgtagcgctcctccgagaggccggctttgtgagctcgccccgccccccggacaccgccccctcccctcgcgcacgcgcactgcgcccccgccgcctggcgcccgcccgagctgccgccttgtcgagctgagtccgcgcnnnnnnnnnnnnnnnnnnnnnnnnnnnnnnnnnnnnnnnnnnnnnnnnnnnnnnnnnnnnnnnnnnnnnnnnnnnnnnnnnnnnnnnnnnnnnnnnnnnnnnnnnnnnnnnnnnnnnnnnnnnnnnnnnnnnnnnnnnnnnnnnnnnnnnnnnnnnnnnnnnnnnnnnnnnnnnnnnnnnnnnnnnnnnnnnnnnnnnnnnnnnnnnnnnnnnnnnnnnnnnnnnnnnnnnnnnnnnnnnnnnnnnnnnnnnnnnnnnnnnnncgtgttccccgccgggcctcgggccaggcccagccccgggcgctgctcccgctgcagcggccccgcccgggacccccgccccggcccctcggtggacggccgcgcgcgcagttccctccacccggtccgcccccactcgcgcccccacctccgcctccccggcggaccgctgacaaggccagagcgccggcactgggtcctctttcccgcaggcagcgtgcccggcctcacatcgcccctctccctccactgccccttcagggaaggaccccagacccaccaagccactcagtccctggacgaggtgcgcttcccctcctcgtagaaacgcccccagcccgctcccgccgctcaccccaacccgaggcagccaggctgcagctcgctaggtggggtcctggggtgcgggtcctcggtcctgaacggtaggcccaccgtgcctcctcgcgcggggccgcagacctgtcctggccggtctgcgagagccattttgagcggttacgttcccggaccaaacagaggtcggcctgttacatcgctaacgacactccctgctgtctcgcttgcaagtttccactcaccccggtccgtttacccatctcctcaaatgctagtttaatctgtgacctgggcaggtgctgtcctagccggtggggaagacaggaaagcgaaggacccaggcrgggagcctgtccaggatctcagatagggagagccaggtccccacctctgttgggccggccacccggctggtgtttaagatgcagattaattcctgtctttgcacacagtatgcttttctgactgcatgtcacaggcagattcctgggctccacctcagggactgagggactcaggaatcggcctgtggcatgcagtccaggagggcacactgaggtttggttgctcggcttcaggtgktcaggcttacctggatgaaaagcagtggctgctaggaggagccaggcagcatctggtctaggggccgccaaytcatcaccgttcccgtaaccttggcccccgctttcctcaagatcaagtctccaaccttcctgttcyctcaaaaggattgttccacagagacacctgagtgttcatgaaaatgccaagccttggcccggcgcggtggctcacgcctgtaatcctagcactttgggaggctgaggcgggcggattgcctgaggtcaggagttcgagactagcctgggcaacatggcgaaactccgtctctactaaaaatacaaaagattggccggkcgtagtggtacgcgcctgtaatcccggctaaactgkaggctgaggcgcaagaattacttgaacccggaaggtggaggttgtagtgagcccagatcgtgcacctggactctttggactgtgtctcaaaaaaaaaaaaaaaaaacaaaaaaaaaacacgccaagcctagaccccaccgacgtagaaacttggtgggtgtgttgggtcaagaaattgcattccccgccaccccccgacggagtttcactctttggcccaggctggagtgcagtggcgcaatcttggttctgccttctggtttcaagtgattctcctgcctcagcctcccgagtagctgggattacagggaccgaccaccacacccggctaatttctgtatttttagtagggagggggtttctccatgctggtcaggctggtcttgaacttcctgacctcgtgatcyrcccacctcagcctcccaaagtgctgagattacaggcgtcagccactgtgcccagccatcatattcttaaaagtcaagttaaggttgttttgtttgtttcttttacatgttcatgttttttgagcccaaaggttggggcaggttgggcttgagctgggaggggctggrcaccttttttgtaagaccgcctatctgttgttcctcctctgagggtgtttccaggcgtctagactcacccaggtgagttgatgctgacaggagctgctcggccttctgagctgcctatttcgccttctgttcctctggtgtttcgcttgggtagggcatgggcacasttcactcagctctggccctggcctggctgtctaacgctaggactgttatagtggactttgcagctttttgcttggatttccttagttcctctctctccctgtatttgtccagcctgccaaggaaaatgcagcagttgggttaaattggcatggctaggttgcactaatgacaagtaccacgtagctsgcatttaccgaggaccggttttgtactggcactttgtcccctgggcagcgctacagggcctgcccctcctctccccctctcttgtactgtactcggccctagatgcagcgtgatccatctttgcgcagggaatctttgctgcaggtgaaatggagcggtggccacacctgttctctgcaaagtgggtgttgtwatttctctgccttcctcttggatgaagactttgagacatgctttttaatgccttccatttcgcgttagtgttacaatcagcctgtgcaagatttcagttccaagctccaagctagaatttacagtgtgtaaactcattagattgatggtagtgctagcttctgggattccgatggccagtggtatttgcaagcatgtctcagtggctttcccttttaaaaatgctgtccctcctttccaagtaacctgttgtgcttttatgagatgtattsaagtaatgaatctattcccatggtagaggaaactagctgcttactgtacagatttgggataattttcattgtcaaggtgaaaccgattgaactgcagtcttttttcgttcccctgcagtgtgagtcctgctcgtagaatatcgttggtgtacttgaggctgcttttccagaaggcaggatgtggaarttccagcaggcagagctgcctctggcttgctctcatctctgtgttttgtggctcctcactgagtgcgcgagccctgtgagctgttagcatgctggaaggcagcctcgkgccagcagcctgtgcatggaggcactggagcccccccatgaggcgtagaccactgggtgcccgtgcttgtgttttcaaacgtggctgtgaacgtgattgcgtcacttggggtgcattttaggatttggatgtgatcccaaatktctayaccctgaagctcagtcttctgtcatttggcgtgttagctttctgtcaggaaaccttttgctgttctttttttaatgtgtccagggctctttgaagaaaactgcattttgtttgcayaaactgctgcattcytacagacttctggataacaaaataagaagcacgcttgagggtggggtctttcattatgatgacaaaaggggagagmgcaggggtgtcagcggagcagctggaaagtattagcaaggacttaggggaattaatagggtcctcaatttggaatggtttgtttgctacagggctcaatatggtagtcaaatgtttttcttttcatcctttttcttggaaatcaattttttaaaatatagtttgyttcttggctccctgttctgcatctcgctcaacagactgcctctgtcaccgggtccctccacccttgtctcctgtgcggccagcrtyagakccatggcgacggaggagaagaagccygagaccgaggccgccagagcacagccaaccccttcgtcatccgccactcagagcaaggtgcgtgcccaggggccccytggacaccttccgggggcaaatacgcttagagagtctcggaaacatctcaagctcataagcctagtcttccctactcagttaaatgtcactgctaatttttatttactgaccgcatatctggcgaatgcttgttgcctgctgtgtcagggatcccaaatctgtcacctggaggagagagccttttatcaaaaatacagattcttggttctgattgtaagagtctctgtaggamccagaaaacatctctttatagttgcccccacccyggctgcgatcctgacgcacaggcagttctgcaagccctcccgtagacctttagcaaagggagcagggcttcagtgttcggggtcggagggtgrggcgctggaccaaggccagagctggtgggggcctcctgtgctgtagcaggatcacaggtgggattgaggtggggggatgaggtggattgaggggggcctcatgtttctggctcggctggtgctgttggtrctgagtttggagactacagaagaggaggtcttgtggggaagtagtgggctcagattcagatgtgttccacttgaaaggtactgtccacatagagattggtggaaggcactgggcatgtggatttggagctctaaagatctgagctgaaattaaatggtgggagtcaaaatccaaactggtcacgggtggaacgtacagtggtggtgactttttgctaactggtctttcctgcagcctacacctgtgaagccaaactatgctctaaagttcacccttgctggccacaccaaagcagtgtcctccgtgaaattcagcccgaatggagagtggctggcaagttcatgtacgtagcactgaggcccttagctgctgggagaggcggtctgagctgcagacaaaaagctggcgaggggatggcttgcttcctcacctaccgctggggrgacgtagcaggccgctggggggcacgtagcaggcgggcgtgtctcctcctggaacygtgagctcagtgctggttgaaattgcccgtggggggccaggcgtggtggctcatgcctgtaatctcagcactttgggaggcagaggcaggcggatcacgannnnnnnnnnnnnnnnnnnnnnnnnnnnnnnnnnnnnnnnnnnnnnnnnnnnnnnnnnnnnnnnnnnnnnnnnnnnnnnnnnnnnnnnnnnnnnnnnnnnnnnnnnnnnnnnnnnnnnnnnnnnnnnnnnnnnnnnnnnnnnnnnnnnnnnnnnnnnnnnnnnnnnnnnnnnnnnnnnnnnnnnnnnnnnnnnnnnnnnnnnnnnnnnnnnnnnnnnnnnnnnnnnnnnnnnnnnnnnnnnnnnnnnnnnnnnnnnnnnnnnnnnnnnnnnnnnnnnnnnnnnnnnnnnnnnnnnnnnnnnnnnnnnnnnnnnnnnnnnnnnnnnnnnnnnnnnnnnnnnnnnnnnnnnnnnnnnnnnnnnnnnnnnnnnnnnnnnnnnnnnnnnnnnnnnnnnnnnnnnnnnnnnnnnnnnnnnnnnnnnnnnnnnnnnnnnnnnnnnnnnnnnnnnnnnnnnnnnnnnnnnnnnnnnnnnnnnnnnnnnnnnnnnnnnnnnnnnnnnnnnnnnnnnnnnnnnnnnnnnnnnnnnnnnnnnnnnnnnnnnnnnnnnnnnnnnnnnnnnnnnnnnnnnnnnnnnnnnnnnnnnnnnnnnnnnnnnnnnnnnnnnnnnnnnnnnnnnnnnnnnnnnnnnnnnnnnnnnnnnnnnnnnnnnnnnnnnnnnnnnnnnnnnnnnnnnnnnnnnnnnnnnnnnnnnnnnnnnnnnnnnnnnnnnnnnnnnnnnnnnnnnnnnnnnnnnnnnnnnnnnnnnnnnnnnnnnnnnnnnnnnnnnnnnnnnnnnnnnnnnnnnnnnnnnnnnnnnnnnnnnnnnnnnnnnnnnnnnnnnnnnnnnnnnnnnnnnnnnnnnnnnnnnnnnnnnnnnnnnnnnnnnnnnnnnnnnnnnnnnnnnnnnnnnnnnnnnnnnnnnnnnnnnnnnnnnnnnnnnnnnnnnnnnnnnnnnnnnnnnnnnnnnnnnnnnnnnnnnnnnnnnnnnnnnnnnnnnnnnnnnnnnnnnnnnnnnnnnnnnnnnnnnnnnnnnnnnnnnnnnnnnnnnnnnnnnnnnnnnnnnnnnnnnnnnnnnnnnnnnnnnnnnnnnnnnnnnnnnnnnnnnnnnnnnnnnnnnnnnnnnnnnnnnnnnnnnnnnnnnnnnnnnnnnnnnnnnnnnnnnnnnnnnnnnnnnnnnnnnnnnnnnnnnnnnnnnnnnnnnnnnnnnnnnnnnnnnnnnnnnnnnnnnnnnnnnnnnnnnnnnnnnnnnnnnnnnnnnnnnnnnnnnnnnnnnnnnnnnnnnnnnnnnnnnnnnnnnnnnnnnnnnnnnnnnnnnnnnnnnnnnnnnnnnnnnnnnnnnnnnnnnnnnnnnnnnnnnnnnnnnnnnnnnnnnnnnnnnnnnnnnnnnnnnnnnnnnnnnnnnnnnnnnnnnnnnnnnnnnnnnnnnnnnnnnnnnnnnnnnnnnnnnnnnnnnnnnnnnnnnnnnnnnnnnnnnnnnnnnnnnnnnnnnnnnnnnnnnnnnnnnnnnnnnnnnnnnnnnnnnnnnnnnnnnnnnnnnnnnnnnnnnnnnnnnnnnnnnnnnnnnnnnnnnnnnnnnnnnnnnnnnnnnnnnnnnnnnnnnnnnnnnnnnnnnnnnnnnnnnnnnnnnnnnnnnnnnnnnnnnnnnnnnnnnnnnnnnnnnnnnnnnnnnnnnnnnnnnnnnnnnnnnnnnnnnnnnnnnnnnnnnnnnnnnnnnnnnnnnnnnnnnnnnnnnnnnnnnnnnnnnnnnnnnnnnnnnnnnnnnnnnnnnnnnnnnnnnnnnnnnnnnnnnnnnnnnnnnnnnnnnnnnnnnnnnnnnnnnnnnnnnnnnnnnnnnnnnnnnnnnnnnnnnnnnnnnnnnnnnnnnnnnnnnnnnnnnnnnnnnnnnnnnnnnnnnnnnnnnnnnnnnnnnnnnnnnnnnnnnnnnnnnnnnnnnnnnnnnnnnnnnnnnnnnnnnnnnnnnnnnnnnnnnnnnnnnnnnnnnnnnnnnnnnnnnnnnnnnnnnnnnnnnnnnnnnnnnnnnnnnnnnnnnnnnnnnnnnnnnnnnnnnnnnnnnnnnnnnnnnnnnnnnnnnnnnnnnnnnnnnnnnnnnnnnnnnnnnnnnnnnnnnnnnnnnnnnnnnnnnnnnnnnnnnnnnnnnnnnnnnnnnnnnnnnnnnnnnnnnnnnnnnnnnnnnnnnnnnnnnnnnnnnnnnnnnnnnnnnnnnnnnnnnnnnnnnnnnnnnnnnnnnnnnnnnnnnnnnnnnnnnnnnnnnnnnnnnnnnnnnnnnnnnnnnnnnnnnnnnnnnnnnnnnnnnnnnnnnnnnnnnnnnnnnnnnnnnnnnnnnnnnnnnnnnnnnnnnnnnnnnnnnnnnnnnnnnnnnnnnnnnnnnnnnnnnnnnnnnnnnnnnnnnnnnnnnnnnnnnnnnnnnnnnnnnnnnnnnnnnnnnnnnnnnnnnnnnnnnnnnnnnnnnnnnnnnnnnnnnnnnnnnnnnnnnnnnnnnnnnnnnnnnnnnnnnnnnnnnnnnnnnnnnnnnnnnnnnnnnnnnnnnnnnnnnnnnnnnnnnnnnnnnnnnnnnnnnnnnnnnnnnnnnnnnnnnnnnnnnnnnnnnnnnnnnnnnnnnnnnnnnnnnnnnnnnnnnnnnnnnnnnnnnnnnnnnnnnnnnnnnntgcctcagcctctccgatagttgagactacaggcgcccaccaccatgcctggctaattttttgtatttttagtagagacggggtttcaccgtggtttcgatctcctgagctcgtgatcctcccgccttggcctcccaaaatgctgggattacaagtgtgagtcactgcgcccggccaaaactctgtcttwaaaaaaaaaaaaaaaaatcaagaacaaatggccaagagttaaactacacagtatcataaaccgctccatttcacraagtggccagaaagttcttttgttaacaaagtgcatgaggtagtttcttggccaatcctgcccttygttgagaagcggaaggaagggtggatgcagcatttgtcccatgctgcctgcccgtgtgcctttcactttgtgccatcttggcggtgaatgggtttaagcatttttacccttggaaggctttgccygagtgagatggcaggygaagccctgatactgcccggacggacagtgtgtcaggcctgggcggggctgcggggtctgagccccgcacatagctgggccacaagaccctcgcgggcccagtgtcactgctgcggggaggccgtttgctgtggggatggcaccatgtggccctgtgcttgtggctgtgtgcttgcgggcccagccccttggtgccagtccrctgccctccaggacaccttgggtcatagtcagcagagctgaccttcagactggggctgacaaatgaacgcytgtgaagtaacctgagaaaggggttygctggtggcctttgagttggaagaaagaattctgtgagcatcctagaggccaaagatagcgcaggtgggactcgcggttgataggtaggattttaaaagtctttttttcttacgaaagtcacgtttgctcataaaaaaacacaaaaacaggttgggtgccatgtctcccacctgtaattccagcactttgggyggctgaggcaggaggatcccatgagactaggagtttgagaccatcctggacaacatagtgagatcctgtctctatacaaaaagcaaaaattagccaggcgtagtgatgcgcacgtgtggtcccagctacttggaggacggtgggaggattgcttgggcccaggagtttgaggctgcagtgagcaagatggtaccactgcactccagcctgggtgacagagtgagaccccatgtcttaaaaaaaccacaaaggtgagcaaatgtaggaagtagaaaatgaattccctgagccacccctggggtcagctgccaggaggtggagtcggtccctctgtggtcttctactttgcttttttaggtgcatattttccagggtagctcactcctgtcctttaaataactggtaccacatcacagctgctgctccgtagctgtctccactccacagctgctgctctgtagctgtctccactgcagagaggtttgtggggctttggtttttttttttttttttttttttttgaaacagaatctcactctgttgcccaggctggagtgcggtggtgcgatcttggcccactgcaagctctgcctcctgggttcaaggggttctcctgcctcagcctcccaagtacctgggattacaggtgcccactaccacgactggctaatttttgtatttttagtagagacagggtttcaccatgttggccaggctggtctcaatctcctaacctcaagtgatccgcccgcctggtcctcccaaagtgctgggattacaggcgtgagccgctgcgcctggcctggggcacctttgatgtctgcgcacatctatgcccttggattgctggtgtgggcctgctgtgtgagcaaggactctgccagtcgcctctcagtgagtgcttatgtgtaattctcactttgacaaaaaggagtgcagtgagcatcctgtttgcatctgtggccgtttgtgcgggatggctttggaggggaaatgcagtagtcaggatatgtgtttagctttttgacaggtacattttggagctttagagacttmgaggcatgtggccccctgctcactgcctcccatccctgtcccctctctggccagggtttgccctctctggctagggctcctcggctgagggccgctgccgacccccatcatccacagccctygcgccctccttgcacccgggacctgtgtttttcctgccctggagcttctgctactgcttgtctgcccaagtcgactccgcagagyacttggagtgctccttggctaggggccttgccatcccctgctgggttctggctgattaccttctctgtttctttctttctttttttttttttkttttttaatatttatttatttatttattttgagacagagtctcactttgttgcccaggctggagtgcagtggtgtgatctcagctcactgcaagctccacctcccgggttcacgccattctcctgcctcagcctcctgagtagctgggactacaggcgccctccaccatgcccrgctaatttttttttatatttttagtagagatggggtttcaccgtgttagccgggatggtctcgatctcctgacctcataatccgcccacctcggcctcctgaagtgctgggtctttttttttttttgagacagggtctcactctgttgcccaagctggaatacagtgacgcgatcttggctcactgcaacctccgcctcctgggttaaagtgattctcctgcctcagccccccaagtagctgggactacaggttcatgccaccacgcctggttaagttttgtatttttttgtagagacaaggtttcaccatgttggccaggctggtctcgaattcctggcctcaagtgatccgcccaccttgatttcctaaaatgctgggattacaggcgtaagccaccgcgcccggcctcccttatctacctcctcgaagttaacttttctggcagccttctgctggagtgcagtggatgggctgtattgccccttgcacctgaatgtgggtggaatggtagagccaggccatgtttgccagtgggtagtatttggatgtggttaagaagctgaacaaagcaaagcatggagttggccttgtgagttttggggacttgttttgtcttgttactgttacatccatcgtaatagtctcaataagagactgttttgcacatttaaaggtagggatgaatgtggttagatggatcactgtgagttagaaaagtactttgagaggctgccggccagatggttgcagtgaagcagctggcacggtgagagcaccctgtyggagcagaaacaggtactcacccctctgtgtctgctggagaacatctagggctgcagtacccagcatgcccagcatagaggctgccagccgcatgatggcccagagctcagggctgtgtgaggtacctgcagatttcagagacctggcacaaaaaaagaaagtaaagtgtcttgtaataactttttgtgttgattatgttgaaataatattttagatacattgggttacatgttaccaargtaatttcacttgtcttttaagcttttctaatgtagcttctagaacaattaaaattacacgtgtggctggcaggctcttgcagagtctagcctagtgcttctctgggcgtgcagcagcaggcagcatgccccggggacctgttygaaatttatgttcttggactccccctcctggactggtcaaatcagaagccctggggatggggcctagcagtctctgccatagtagctcaccggtgcctttgatgcatgtggatttgcctctggggacacatggcaatgtctggagacatttttrgttgtcagagctataggcatctagtgagcaaaggacaaggttgccactgcacaggggcagtaccaccctgtcccccccggaagagtctggtctaaaatgtcagtggtgccaaggctgggaaactgcttctactagacagtagaagcagacaacctcagtcccatccccgaatcattaaaccacggcttccttgtgtggcttgatttcacccaggaaatgtttcagcacccatagcctgagacaagatagtttccaaaggtgctgtttgattgtgagaaggcttatccttggctgggtgcagtggctcatgcctgtactcccagcacttcggaagaccaaggtgggaggatcgtgtgagctcaggagttcgagaccagcctgggcaagatagggagaccctgtttctcttatgaagaaaaaaaaaagggtgggcgcggtgcctcacacctgtaatcccgcagtttgggaagccaaggcgggtggatcacttgcggtcaggagttcaagaccaggctggccaatatggtgaaaccccgtctctcctaaaaayatatatatataaaaattagctgrgcgtggtggtgcatgcctgtaatcccagttacttgggaggctgaggcacgagaattgcttgaacctgggaggtggaggttgcrgtgagctgagatcgcaccccagcctgggtgacagagcgagactctttctgaaaacaaacaaacaaaaaaacataactcagtctttttttttttttttttttttttgagatcaggtaagaagcagttgtgtccctgacttgaaagtaagtttttgtctcttcttcctctccttaattcctaggttcattttaatcgtgatggatccttgatagtttcaagtagctatgatggtctctggtaagtgaaaacattttacttcatgaagcgatgartgcttaactaagggccagctcttgcactgttcctgcatctgggggtacagcagtgacaaaagacccaagtccttaatttccraagcttctcttctggccacgctgcagacatgttagcagataggcagtgcagtttcggggttggcagcacaggtggtggggcggcatgcctgggaagatgtccttgttgttagggtgggtcagggagggcctcctccatcagacttcagctccgtgtagacrctgacgtgtgctgttcacacgctcgtggaaaatgggtgtttggacsccttgaggtgaaagctgtgctgctctgggaggatgctgagtgatgccgtcttgccctgtgaggatgcgtcaccatcccgggcaggtgaacccaagcagatggcagcatagagaagggcaggaggaagagtgacagggtctcctgcagaaagcccacctaggtctcagcaggtgtttgtagtgcttggacttggtaatctgtgtccagcactcctcaggagacacaagggaagtggagaagtagaggttaactcagcgaaatgtctgatgggagcgagttgggggagtggagtgtttgggttgtgttttggatgtggggcggacacatcataagctgttcagattggtcactggggaggaggaggacggtggcagccactggcagaattgaagatcttactaggacttcctgcagggaaccctcaggtggacacgcacactcgaaatctgtttcccagtctgactccccagtgactgttggcgtggggatccccagggggtcacagtctgtagtcgccatgcatgaccccccatcggtcttgagaagacgggtctggtgggagagggtcgtagtygagttgcacccaaccaccggcctcccatgggcttcacagcacacacttccgggccatcgcctcgcaaggttcaagctgcggttgcagcactgtgatggcgtttggggctgaggtcactgggatgtgctgtggcaaaaatgaggtcatccggagccccacrttggccagtagtctccacggttaaagccatcgtttacacttgaccatttaccagcttattrtaaaggatacacttcaggaacagccagaggggaggggtgcacagggtgagctatgggcgagcgtggagctgccagggcctctctggtgccaccctcccggcccctctgtgtgtgtgtcaccaacagggaagtgagcacgggacagtctcagaattactcatggacctggctctaagaactttctaaagaaatcagaaaaagtataccaaggaaattaggagggaaatgggaaacaaatgagaacatagatgatataagatgtcttctttgatgaggctagtaatgaaagccttttaagtcccataatggaaaaagcaaaataagcaagatgagaactaggaggtggttggaagcaccgcagcgggaggaagcgggagtcagaagcctccgtccagcctgagcagtgcctcggctccagcagcgagctcggccacagctcctaaaggggccctgggtatggtgccttaaggagcagtcaccgctgaagaggctggaaaaggggattgaaggcctgaaaagaacatgtcccctgtgactttgtatctgaatccagttcaatagtgaactttgaagcttatcccaacgattcgagaccacaggcgggagggagctccctggttcatgtctttggktttagcatgagcttgctacctaagccttgattgctggtcccagaggaagaccacagagggcaactcactggtgaatgttgatgccaggattccagaggaagtagcagcctcctgagcctaccgtgcacagaaaggaattcccatagccaaggaattcattcattattggataatgaaaggattataacgtaaacatcaggaaacctattatctaattctaccaacagattaaaggcgttaaatgtctctgtctgttattaattagtaggggtcaaaaaggcgcctgattgataatatccagcagccaacccttcagcaagatagagcagtattgttgaccacttactggtaactaataattttcacatgtggcgacatgctgaaactctttctatgaaaatcagaagtgggacaggtgtgcttggttcccatgttactcagcattgttgggagtttctagttagtgtaagaaaatgaaaaaatagtcctatgaaaattgaatagagatacacatctttgtagatatgtttgcatgttttaaaatatttaaaagccaccaacactgcttttcaaatacccatttaaccctgtgacgtgggtactgtcagccttgcttttcaggcagggacagttaccacggtctctcagttgctcagtgcaggaccagaacccgtgtcagctctggagtctgggcctggaaccccctgccctgctagctacgtggtgtgatctcgcgtttagtgccatcagtgcttgaaaatggacttttttctgtatactaggaattgccagttagaagatggggaaaatgtttccattttaacagtgacaaaaatgctaagatgtttaggaatgcggctagtgagaaggagcaggaccaatgcaggaaatgagaaatggaactgaaaggacacacgggggttaggtcttgagggttaggagatgaggcggctccggagaggccctcccgcagtgattgcggagctagaggacatgaatttgagatccatggggcagcaggatggagctgttgctgagagaattgagaagatgcagagttgggaggagagttgctgcttctgggtttgaaaaccctgggtgaagtgtctgaggtccagtgtggtctcgtccctggattattgaagtgtgggcagaacaggaggtgggtgtgcagagcagagagcttcggggccctcccagaggcggcttctccatgggtgagagatgggagggaccgtgcatggcggccatggggtctcgtgcttggggaatgatttgtccacgtgtgacccgagcctgttccccgctgctggcatctgtgcagtagaattgtgggtgctaacacagtgggctctgcttccagaatgcgtctgtattggcagaaatcacagaaaccctgaaattggaacaatgtaaatgcctggcttgtaccttctgggaatagtccagaagactgcttacaatactcttaaatttttgttttgaaagaagccctctcattgcttgcatgtgtttgcatgagcgtgggcagagcctgcgagaagcactgggctgctgctgcccctctccttggccagggagagtggagagagcaacaggcttcccsctctgtgttgggggtmaactgtggcttgtrtaggagagatccagaggtaccccacacatggtctgcacgtgtgtagcatgtgtggactgttratgtttgtatggacagtgtttagtctttgtccctagaatataagagaatgactgttaaacaggtgaagcataacttttaaaaaaagatagggaaaagcgtgctagtcctaaaatttatatctgactcccagcagccyscgtgagatcataacttgtctgcttacgcttttttgttctctttgcttcgaagtcgcatctgggacaccgcctcrggccagtgcctgaagacgctcatcggtgagtgtggctctgtgtrggggctgggtctgtggggagggcctcccctgctgggttcactgcccctgttcttcaccagctcctcctccctcctctgccctgggtccgcccctgcaggaggaaccttcctccgtgtccgaccgttccgccagctccccctgaccgcccgctggctctgttgctccttctggtgcagttttcctgccatggcctttctcttgggccagcctggggctcctccacctgtgctgtcggcctcactccggctgctcactggagtcctctgggcagccccattgcctcctggcttcgggcccctgctgtcgtgccagcctcttggatcattccttgagtgaccggctgagtgcctgcccatctgctgggggtgctgccgaggtggatggaggtgtcctgggggcacggaggacaggcctgaggagaggaaggagggacgtggcgtggcctggatgggaaggccaggtgctgggcagggtgtggcctgagggtctgtgacggcccggggttcccagctgccccttgcagagcctgcagaaaggagcggaagggttttcatccggggagtgttcgtgtttaagaagcctaggctagatgtgtgggatggggcgcaccttgaggagggagctgggtggtgaggatggggggatggacccccgtgtggggaggcaccccgtttgcgcccttcttccctctagtctgtcatagcctgctggcctagctgagaccaagccccacaggctgggaggctatctgtggcaggaatgtgtctccccgcagtccaggaggctgtggtcaggattgaggaggcctcttcttggcttatagacgctgccttaccctggcttcacaccagtgtccctggtgcctccgtgtgtccaaatgtcctcttgtaaggacaccacccttgggcctcattttcactctgtcgccctctttgaaggccctgtctccagtacactcacctctgaggctctggaggcttgggcttcagcatgagtccccttgccacagcggtctttatagcttcctgccttgtggggccagccttttgccatgcatctctcctgattgagatcacaccgcacttggtgtcccctggacgggccacctgtgctcagttgtgtgcgccgctgttgtgtgagcacacgtaaccctcacggccacctctgaggaggggggttgtcctcatcctgcatagaggctcattcactagcccaaagctccacagcaagcaggtgcagggactgggattccagcctgggcgcccctgagcccagggtggggacggaggggtcgctgcatagcagttttcccatcggcgtctcctcaggtctagcgagttagacccttctggacttcactgagacaggttggctgatgcgttcatctctgtgaggctctgcccaggcagcctgggttaggcatgcggacacgcttgccatcagctgtgttaagggagcccggccccccggccctcactgtgacctcggcctgcctggcggtgtgacgtggtgtgcccctgagggagggaccgcatggcctcacagcgtctcccgtgccttttcagtgtatgtgaccgggctgagggagcggagacgccaggtgcctggcgaggccaggcgtccccgtggtggtaatgctgagggccgtgtccttcccggtgctcgggacacaccagcgcgtgcacgtgcttgggggtcggtgggggtctctggtggggcccaggggtggggcctgcaccaggacacaccttccttgagattccctcctcctcactcaggtgagaggagatgccttcctccacttctgagggtcgtggggttgccatgtcctgaaaactctgacctgtacatcgacagcttctgggaaccttgactctttttcagctgtgtgagaagcagcggctctgctctgccctcagggctgcagagtccagctgataggcctggggcattagctgtggatgtgacaacaaacagatgggttctgtgggtgcagatgccccttgcgtcgataaattcttaaaggagaatttccgaggtgattccccagccctctttgctgctggtggagttgtccctctgttgagttgggcattcgccagcctcatccatcccctgtgaggcaggtgattcckgagagtgcccatggcctggtgcccyaggaggcctgtattcgtaaagtcctgktgtcaaggggcccccgggccyatgggcttgaggtgtcaagaacctgctcamggctgrtgtgcgtggctaggccacccttcrgggcggcgaggggtggtggtgctggcactgatggtggwggccgacctcactcagatgtcgcacgtgggggayggggagcgggtcccacctcctgtccctgccyggctgtcagcgcccgccgtgtgtcacctgtccgtttttattgcagatgacgacaacccccccgtgtcttttgtgaagttctccccgaacggcaaatacatcctggccgccacgctggacaagtgagtactgcgtgggactgtgggggcgggcatgtggcctccccagccagagacacctgcgtgccagcgtgagcctttggagagcgtgttgtgggcttggcacgggatccaggctcctggtggagcttcggcttctgggcagtggcctgttaggtcggagggcaggcccccgtccatcccttcccgaggctgaacctcaggtccgactataggaggatttagggtccgttttctggttgagcaactgtggccagggcaggcctagccatcccgcatgaaggagtcggcggtccgggggcctccaaggccctttctggttctgacctctgagcatcttgattttacctctcacaaagccactgccctcctgggctgttctctaagctccagctttcccatgcgtgcaccctcagccctgtgggtccgagcctgggcccygatcctctgagggctgtgtggttgggtggtaaaacctgttctggatgtttccagaaccaagaggacttcctcacccttttgaggatgacccgagtcagggacgataacacccatcagcttcctgttaaagtctctcttggaactacaaatacttgcggctgtcacactgtgctctcagacgccaagtcactggactttgagcctgaggggctccttaccctgatggggaagggggttccagccccgctggcttttgcacctggcgctgatggtggctgtgacgtagtggctgcagagttggrtgtggggacagaaggatgcctccagacrtgccgcctcacccctctctctgtcttgcagcactctgaagctctgggactacagcaaggggaaggtgagcccccgcaggcttgggcccccatggtgcaccatccctgggtcatggcctctggtggggacagagctggccccggtgatgacaaaggagaggagctcagagagccatctccgctgggtttggtgcgaattcctgaaagacctgggtatttgtagggtggcagtctgcaagttaaatcttcgattgtgtgggtttggtacttgtacttttcagaaataagtgaagtgagtagtgaaacgccttgcttagaacgtagaattacacaaaatcaaggggaaccatgactctgtgaccagcctgtcccctcctgtttcagtgcctgaagacgtacactggccacaagaatgagaaatactgcatatttgccaatttctctgttactggtgggaaggtgagtctcataaccttgaagcgtctcacctgttcccagcttactctcccgagaggtcacacctgttacaggttgctttatactcagagacacttttctgtgcccacaaaatgaatttccatttcaaccaaagcgcactgcgccaagtacyggggacaccttgtcccgtttgtttctaggtccatctccttaacggaggcaggcagcctgttgtcgggctttgctggcagtgcttggttgacaccttccgagggcgctgggacccaacaggtggagctctgtgtgctcagggtgtccctgggtgggtgcgctggctccggggctgtcgtccaccggccccagcagggaggggagtgtgttttcccgcccacccacactggtctcgatgctcctgtcttagaccggggtgactcgggcaacatgtgtgtgacacacagactcagaaaagggtgacctgagaagcatcttccatcctggaagcctctcctggggcaggcaggtgcctggcttctgtgagcgaggccggtgctgggatagagcaggcggggctgtycccattgggagaggaagcctcaggcctggctggagggcaggcagggctttttggttgagttcagcgaggcagccaccagcagggtgggcgtggggcagggcataactggagattctctccctttcacatgcatgagctctgacctgcttttccttgccctgttttccctgcttgttgttacgtagtggattgtgtctggctcagaggataaccttgtttacatctggaaccttcagacgaaagagattgtacagaaactacaaggccacacaggtgagggcctgcgctcctgcagtcactggctgcctgttgatgtgaggacagttcctgcaggtgaagcgtggtgtgcccgtagggtgcygtcgtcttccccttcccacctcagccctccgctggccccgctgaggaaccgctgctaagagctcttgcccaaggcatggagctggtcactgtgctgccgactcagacccgggctcctggcttgaaccctgtttctccctgttctgccaggcatgctggtccggaaggtgtgtgtggctgtgggactttaggtgggtgcagcccgtcccacgtcacggcgagctctgtttcctgggctggggacagtgaggtcatcgctnnnnnnnnnnnnnnnnnnnnccagctgcatgcaggcctagtgggctccacggcggagctggttcccaggctacctggggttgccacctctgtgggtcccggctgccctctgcagccgccgctacttcctcaccctctggccctgcatttccacgtctcatggagccaacgagagcagggggttygagcccttgtggaaatctggggaggcactgcttctccctccmtgtgagcagcttcacccagcctggggtcagtgcttacgctccacggcgggcctgggccttccccygggtcctcgccggcgttctggggttctttggtttacgtagaagctgtaaacactttgatgtggccgaccttgcaccaccagtctgttagttctgacctccctgcttgggtggtggacttgtccttgctgtgacagagccagccctgtggggtgctytggggcttagcattggggggaggcggtgggagtgggcggctcagggtccgaggagaagagggacattgtcgataaaggactgaggactgtgaggggtctgactgcagtccttgtgcgcgccagcctctgagccagtcctgctgccgcgctcctccttgtgggcgccgagctgctgttggtgggggcgtgtggggctcctggtctgcaggcagggctggcactccctgtggcctcctgcscctgtcccccaaccggctgtgtcgccctggtaccggctgctgtcccctygctcccctcccctgggctccctgtgtcgaaggtgggcagtgggtgcttgtcctgtgacctcccaggtggcgggcaggcgctacccgcgtttctggagaaaggtggagctcagtctgggatggcgtccccgacccaggcgcagggatggctctggttctgactgtgtctttgttttcagatgtcgtgatctcaacagcttgtcacccaacagaaaacatcatcgcctctgctgcgctagaaaatgacaaaacaattaaactgtggaagagtgactgctaagtccctttgctcctgcccgcragagactgtcgggaagttgacccggattggcaagaaacagggtgtcttggaggtggtcccccagatctgcgcctgggggtcaggacagggcctgatttgagcctcctctctgaagatgatttggccgagcggaaggtgtggaccaccrgaaagttcttaaaagttgctggtgacatttcttgccaattctaacactgtctagggaagagttcctagtctattgtgttcaaacagagtcaacaaaagtttttaattttttattacagaagggtgaagttcaatttaacatgcgttgtgttttttcagtaaacgttctgtatctttttgatattccatgacccagtgcacgctgtggcctgtcaccgccaccgtggccccgccagctggcctcccctttggcccacgccggccgcccccattctctgctgcgtagatgccctggcccagggccctgactcctccattcccgccagtagctgttcctagtgtattttcgtctttctggaaaacagcattgagtggttgttttctgtgtaaagagccgtttgtgtcttgggagtttgtggcccacatgccgatagcacggtcatcgcacatgactctcccgtttgtctcagtgtccctgcaacaagcagcaccgcagactgtaataaaaggtggggttttgtgaatggttgtggcaagtgcgtccttgtgaagctcgtctccatgtggctttcttggagaaaggctcccctggggmaagagggyggaaggtttctttggacaggaggtgctgaggctggctgcacctgctctctgaagacgccttcctctctaggttcattgttcagtgttgctgggggcggggaacgggggtggggaggttcttagttgcgaaggagccaagctcctgatggacttgcgttgggatgtgggggacacctgtggyatggtaaggctccctgagtcccttactccaggtcagatgccagtgggactcatgcgccctatgagggctgcagggccagtgctgcccctcggactcctcgaggggttgggtgctaagcgcgagcctcgccgtccctgctggagccctcgcctgcctgcccctctgcctgtgctcctggcastgtggcttcccggtgctcacctgcacagcagttaacagcagaggccgagcgggagcctctggggagcgaggctgaaacctgaacctgcccatggagacagttgtggtgagggttgccacacacagtgagggcrgagcagggtggctgagggcacaggtgcctgggtctgtcccacggggcagggctttggggctgtgatgctctgggaagccagcttgggtcctgggtctacagagggccctggccccggagcccagccagctctgcctctctcagggcctggagtcctgggggagctcagccagctctgcctttctcagggcctggagtcctggatgaatcctgcaggtttttggttgcaccggcccagggaggaagcggggggtttgtcaggtgggctctcctggaggtcctcgagtggcaggggtgaggaggggattatctgaggcatctggagatgtatrtcctgtggtttcccctgcccctctgtttccgatgaggtgtacggatgagtgacctgcactaagaagtgagttgccacagtgaaaatgggttggtttttgtcttcgacgctcagggtctgggcgcctcgcatttgcagtctgttgtgacagacacggggagctccgcgtgccagcctgtggctgccctgctgtgggggtcctggggccggcgaggccccttcagtcttgttctggggggacggcccactccggggagggggtgtgctgtgctgagcgctgtatccctgaatatagtttattttttctacatttgaattctgttgtagatttatgtaaaaatacattctttttgaaaataaaaattttcatgtcttctaatttagtctggtgagaatttcttaacttaaaacgtagctgtctctgtggggtgggagggcggcygccctggggctttgtccccggtggtgggggtggtgtctggtgagccagggtgccccgcaggacagtcctgggtttttacagtaaccttaggaaagtcatctatttgtgctaattattctatgtattttgtattggtttttccactcttaggtatatacctgtgtgctaattactgacagtgttaggcaggtaggcacggatgaggagaggtcctccaaagtcctgctgccaccaccatgctggggcgtatcttccaggatatgcgttataaactaacaggagctttcagatgtgaagagtgtggcgccccccagtttcctgtccctgctgcaggaacttcatcgttgttcatcggctcctcctgttatttcagtacaaatcccagacattstaccatgtaagtggtgaacgcatggtatctcaaaacaagtctccagaagcattattaccacaatgccattttcataccaaaaaagttctccaaccccctgcctttttttttttttttttttttttgagatagggtcttgctctgttgcccaggctggaatacagtggtgtgatcatgacttactgcagcctcaacctcttggacacgagtgatcctcccacctcagcctcccaagtagctgggaccacaggcacatgatatcatgcctgtctaattcttttatttttgagacagggtttaaytctgtcacccaggctggagtgcagtggtgccatctcagctcactgcaatccccacatcccggttcaagcgattcttgggcctagcctcccgagtagctgggattacaggcccggctattttgtgtatttttagtagagttggggttttgccatgttggccaggcaggccagcgaatttttgaatatttttattgcagagacagggtctcactgtggtgcctaggcgtgtctcaaactcctggcctccagtgatccacttctgcctcccaaagtgctgggactgcaggcgtgagccattgtacccagcccccctaaagttatttaaytgaatatctgatgttcagatttcccgttgtcttagtatgttttaaaaaattgtgcctgtgcacacatacacwcacayacacacgtcacatgcatgtgtacacatatatatgcatgtagtgcacacctgtacatgggtgcacacaagtacatttgtgcagcaaaccacagcatgtgtatgtgtatgtagatgtacctgcaaggtatgtgtgcatagggtatgtgtgtgcacatgcacaaatgcatgcatacacatgtatgcttgtgtatggaatcaggaaccagacaaggtcttcacctgcatctggttagtttactagctgttttttttttttttttttggagacgtcttgytcttgcccaggctggagtgtagtggcacgacctcagctcactgcaacctctgcctcccaggttcaggtgattctcctgcctcagcctcctgagtagctgggactacagacccccacccaccacgcccatctaatttttgtatttttagcagagatggggtttcaccatgctgccaggctggtctcgaactcttgatctcaagtgctccgcctgccttggcctcccaaagttctgggattacaggcgtgagccactgagcccggtccctcgagtctttttaaatcgccaggtcctccctcttttttctgtgccatgtatcgttgaaaccaggtcgtttatcttgtggcctcctggtctggttttgctgagtgcgtctccgtggggctgttcagyatcttcctgtctcctgtgttccctgtaacctggcagtgggggaggcagccggccatgctccatgcacccaccacggtgggtggtgctgtgtgcgtgttcaaacagctgactcattagcagattggttttatttgataaacatctttccagtccttacttgagtcctatgttaaaaaacatacaggagtttgtgcctatgacagacgtgatgcacggggacacacaggccaggcgaatgctctcatcacgcttgccattctcactctctggggtgcctttctggtggtttccatctatgggaaaccatgcacaggtggggtctatctgtgtcatttaggaaaacaagctgtgtggcacatcctggcacatcctgctcttcagcccatgaaggaagctctcaaaacactgcggtggggtaaggtgttggcagtgtggattcaccgtcccagcaaggagctaccttagggtcaaggatgagttctgagaaataggagaaaagaaagactcagtgaagaggagaatcaggtatggttacccagaggaagggcagaggatgctgaatcccagtagagtgatgcccgctcctgggctgtgggctgagatggcatttcatgcccttgggggagaccctgaccctcaccaccaagcccgacaggtgtggtggagcagggggtgcaggtactgttaaaggtgagatccacttggcaaagattttatgtaactcaactaatgaggggacctgtaagatgttacaaccgcttgaaagtaccacacttacgcaggcaaacgaatgctaagacaaattgcaaatagattcaaactggcaaaaggtcaaaatccacagtaataatcacatcccactgggcaggcacattgagcttcctacgatttcgagctgtgaacaatgaacagcaaagagcaaaggtggagaggacctggatggctgcttagactccttaggttgagcaaagggttttttccttatgcctatttcaaggtctctctgtttttcctgatagtcgactcttctgtcaaaagcttggtgagcaggagggagggttcccataaggtcttttggggagggaaataccagaatatggggtgaccccgaggggaggggctctaacagatgaaggccgcttggtagcttcattgtcggggtgcagggggcgagctgggctgcggtttccagcctccaggctgagccctcacctggatcggcccactctctcctaagggatgcagccaggctgtggctttaacgtggctggtgtgctgactgcgcagtcctgagccctggagcggcgcgcacttggcctgcctattttccacatcccaggcctcagtgccgggccctccagctcccggggcctgcgcctcccgcagccttggctgtttcagcaggtggcaccgcgtccttccccggagggggactgacaccctgcagttacccctgaccctgccctccacggctgttggcacatcttctccagaacccagggctctcagcccctccatggtgcccgcacccggcctccggcctcgccccgccgcagccgcgaaggtcttcccgctgccatccttgcccgctgggctgttctcagcgtggccgccagggatgtcctttgagctcattcggtcccgtccctcccctgcgggaggttctccaaggtctcgcccttgccgagggtcgaagctcaggtccttgcacaggtccctggggccccgggccaaacgggtcgtcccctgatccctctcctggcccctggctcccctccagccccgggaccttgcggggccctccctgcgtctacagggctaccgaggtcctcgcgccgccttggatctggacttgggtgtggacctccccgtccgccctgctcgctggagcgggtctccacggggctcggggcggaggctgtggaatggccgggaatgcgctccggccgggcagcggcttcgctcggtagctgccgtatctccgggccgtgcccagtgcttagttttctgtgaatgaatcaatgttgagcggaaacttccgtcaggctttgaaccaggccctgaacgtttgcgatgctagggacgcgcccgtcaacccgccgagccgccctgtgcctcatgcggcgaccgaggcgccctcgggagacgggccctgtcgggtgtcgagacgcgaacacgacccaatgccaagaacgggcggtgaagatgaacggaaaagccccaagcagcggcggaacggcgcgcccgtgcacaagtgcgacccgcgcccgtgtcccaaggaaagaagataaaagataaaacgaaaaatgccccggggctttgcggtgactcacgcctgtaatccccgcactttgggaggccgaggcgggcggatcacctgaggtcaggagttcaagaccagcctggccaacatggcgaaacctcgtctctactaaaattacaaaaaaattagtcgggcgtggtggcgcgcgcctgtaatcccagctactcgggaggctgaggcaggaaaatcgcttgaatccagggggtgcaggttgtagtgagccgagatcgcgccattgcactccagtctgggcgacagaataagactccgtctgaagaaaaataaaaaacaaaacaccaaaaaaaaaaaaacgatggttagatgccacgaagtaggtggcaatgccttaaccgtatgcgtgttgtcaggcccgagggcctcttccatccttgtcaaggggagtgctaaccttctctcctttcatacaacacgcctcggcttccctgcgcactttatttaaggacgaaagctccactcgcctttcggtgagggtgacttcttgttcgctatccatggaggtacatttataaaaatgtcatggttcagtgggaaaccacaaatgttcgcattcaattaatcgtctttgttaaaatttgaacgtgtaagaaaaaaatctaccacttttcgtgccctaatatattcataaaagtagccaattagaagctgaggggaacaaacggaagtcccgagcgtccttcagagaagtagattcccccggaaacaaaacagggcgggcgcgcacctcctgcggcgacacgcctagcagacggcggaaggcgggaagaactgtctacggaagtggaaggttggtaacgaatcagagaacaaggatcggaagatccgttccacggacttccggacgcggccctgccccgggaactgcgggtgttcaggaccctgtggtgcgcgggacgccgcccgcgcatgcgccgcgccggctcagccccgttttcgcaagctctgcgtggtcttgggtggcgagttcgagccttagaacggccgagtgccctggaaccggtttcggctctggcgtcctcgcgtgtcctccggctccaggttacaacgtcagtattggcgccttggcgcggtcccgtcctgctctcgtcctccgttccgtggaccccggggctgttctggcgcctcgcaggccgggcccctcccatcgactcgatgggcagggctctgcgaggctcggggaccggggacgcgcggccttcctgacaaggagcccgagggtctgcacagcctggggcaccacccggcctggtgaggatgatcgctgtgcgcgcaatgcacatgcgccctcaacacctctgcacattcatgcacgtgtccatacatgggtgcacacacgtccttacacgtatgtacatacgcatgtgtacacacgcccatgtctacacgcgcacatgtctgcacacgagtcacacgtgcaagtgcacgcatggatggtggacacgcgtttacacacgtgaatatgtgtatacacatgcagacacatgtgcctgcccacatggatgtgtgcacaaacaagcacagaggtcctcagtggctcactcctggtggccgtgtgctgtgggctgggaatggccatactcatttctcagagcttttgagttgtgtgtgtttccagttgtgcatattaattagaaaaaacaaaagtgaatttgtaggttaaggcaggtccttaagtttccttaatttcctctccctggagacctggcaggctgggccgggcactgctgcggaaggccagccgcaccctgagtcaggtcttctccagaaggttcagggcaagctctggattacagataggaaaccaaatgcatgaggaaggcactgctcaccctgcaatgacggtcaaggtgtggggtggggagcagcagcctggaggtcagagccaggaccttgggggctgagagtggtgtgcttgcctggtgatcttcagcaatgggaggcctggtgtcaccctggggcccagactgtgaaggactggtggctttggggatctgcgtgatccagggggcccaagcatctgcccagccggcattctgtgcactgcccacctgcctgtgttgtcaacgaggacggggtttgctaaaatgcagattcttgcctcttccctagtctgagtccagggtctgtggtcaggcctgggaatctgtattcattgaggccctttgggtcccgccatcatagcagcctgtctttactttgggtggaggtcggaggtctgcacatcacccaggaggcttaccagtggtaacccaagaagagggaagatggcaagagggtctttgcagggttgggagggcaaggatggaaggacctgggaggccacagcaccctctcggacttggcgcagaacccgtggaaacagcctgcgatgcacggatggaggtggctttgccctgtgtctgctggtgcctctggaactccggctctgacagacgctgcgtctcctgctgactgctgcatcccaagatgagcccagcgcttgcacacagggcgtcccaaagtgtttgttgaacaaaggcatgatcagtgttggtattgccctgagactcatgccctcagccccgattcgggcacatggctcatgtcaaccgctggaagtccctctggggcccacaaatgtctctagaccacaggargagtcggcctggctccatgtgcctggcgcctggggcagaaaggtggacggggcaatcagagtggtcaccatcggggagtacactttgcactccactcgagtctccagggatataactcactggatcctaagtctcactttctgagggccgttcttagagtctcctgtatgaaatcaggctacatccagagaaagttccagaaataagaaaagatgagatcgcctactgaccctcccattttttgcacacggacactgagggaggggaggaacttgctcaagggcaccacacaatttttttttgagatggagtctcaaagatggagaattcctccaaccatgaggaatttgaacgcttatcccgaatagtggaaaatgaacgtctcatggagttagggcctgtcaccacctggggatctacagtcagacatggcatagaggatgccctcccagatcccgctctgtctcccagactggagtgcagtagtgccaccttggctcactgcaacctccgtcttccggattcaagcgattctctggccttagcctcctgagtagatgggattacaggcgcacaccaccacacccggctaattttgtatttttactagagatggggcttcaccatgttggccaggctggtcttgaactcctgacctcaagtgatccacctgcctcagtctcccaaagtgctgggatcacaggcatgagccaacatacccagcccaccccatgagttattgctagagtggtggggtagggacccggcccccagctctcagtgctggacatgggcagggtgggcatgggttcccttccagccctggcagagccctggaccatgcgtgcttttcccctcaagtgtcgaggcaggcagggctgctgcatagaatacaagatgccccattgagatggaatctcagacaaatgagtcatgttttactgtaagcatatcccaaatatttcatgggacacacttatactaaaacttattcattgtttatctgagcttcaaatgtagtggagtgccctgtatttttatttgctaaatttggcagccctagtaacgggagctggaaggcttttgttatttgccctcaagcagcatttcctggcattggcttcagtgaccagttgtctcttgaaatgtcccatggacagaagggaagaaaactgggaaatactgtgttaaataaacttgcacaattcctttttttttttctttaaagaaaagcctagccgggcgtggtggctcacacctgtaatcccagcactttgggaggccaagaagggcggctcacaaggtcaggagtttgagactatcctggccaatgtgttgaaaccccatctctactaaaaataaaaaaattagctgggtgtggtgtcgggtgcctgtaatcccagctacttgggaggctgaggcaggagaattgcttgaacccaggcgggaggttgcagtgagctgagatcacgccgctgcactccagcctgggcaacagagtgagactccgtctcaaaaaaaaagaaaagaaaagaaaagaaaaaagcctattagttggcaggagggcttatgaaaatgannnnnnnnnnnnnnnnnnnnnnnnnnnnnn

SEQ ID NO: 6804 - DNA, 125796 bp, Homo sapiens
  misc_feature (1)...(125796): n = A,T,C or G, or insertion/deletion polymorphism (see Tables 1-2)
aaagaactgaggaattggattttattaaaattaatgttctttccatcaaaatatatcattaaaagactgtaaaaacaagacactgagaaactagaagaaaacattcacaagatatgcatctaacaaatgatcgatatccaaattatatacagaatttctgcaaatcaacaattaaaagaaaaacaagttggtcggttttggtggctcatgtctgtaattccagcatttgggaggctgaggcgggtggatcatttgaggctgggaatttgagaccagcttggccaacatggtgaaaccccattgctactaagaatacaaaaattagccaggcatggtggtgcatgcctgtaatcgcagctacttaggaggctgaagcaggagaatcacttgaacccaaagagcaagaggttgaagtgagctaaggttgtgccactgcacttcagcctggacaacagagtaagtgagactctgtctgaaaaaaaaaaaaaaaaaaaaaaaaaaagaagaataaaaataaagaaagaaaaagaaaaataagtcaacacaattggccaaaagttttgaacagggacttcgctaagaggataactaaatgctcagtaagtatgttaaatgtttctcattgtttctcactggtcaggagttcaagaccagcctgaccaacatggtgaaaccttgtgtctactaaaaatacaaaaaaatagctgggtgtagtggcgggcgcctataatcccaactacttgggaggccgaggcaggagaatcactggaacccaggaggcggaggttgcagtgagccaagatcgcaccattgcactccagcctgggtgacaagagcaaaactctgtctcaaaaaaaaaaagaagtctcccattatttatcaagaaaggcaaagtaaaactacaatgaaataccacttcacatccaccagaattgctacaaattaaaagaatgataatattaagtgttggtgagtctatggaatattggaactcccatttattgctggagggggtgtaagtttgcataaccactctggaaaactgtgtggcaagatcttctaaaggcagatgtagacctatcctaaggaaccagcaattccattcctagaaaaatacccagtagaaaagtaaacgtatgtccatcagaaaccatgtatagaatggttataacagctttaccgataagtgccaataagctggaagcaacccaaatatctataaatggaagactagatgaattgtattaactaagtttatgcaattgaaaattatggagctacaaaaaagaatgaactgttgatatatggaataacatggatgaagttcagagaaataaagctgagcaaaagtagccagacacaagagtacatattgtgtaattctttttataaggagtttaatacgggcaaaactaatccatgactatataatcagaaaattgctttcttcctggaggtgagggagatatgaatctggaagagaaacaaaagatccttttagggtgttggaaagtttcatatctggatctgagtggcagttactccagtgtctacaggtacacaaagtaatcaaaatgtgcacttaagatgtatacagtacactttattatgtatatattatgcttcaaagaaaaataaattttaaaacactacatctgtcctcagcatacttgacctcttagtaacactgaaaccagttagccacactattttaaaccctttcctctcttgagagtaccaagtttgtctattttcagtcttttgggctgctccttgtcagttctctttagtgggaatcttagttctctaagtattgtagtgtctcagagctcaatctagggccactttctcttctctttctaaaatctctccctgggtcagtggttctcagcactcaagaatgggtcagaattaatctaacggcttcttttttaatattcatgtccaactaacaccctagggcttcttattcaattgatcagggctgggatttggcatctgtatttaaaagttccccaggggaatctagtacgtagtcaaaattgagagctacttccctaagtgattttatcccattgcaaggcttagataccatttgtgtactaattacagtcacatgtgtttccaatacaaatgtttccttaaacacaatagtattatgaaaaatatctatttcatattttcatctatgagtcaaaatatccaaaatggatttcctgactttctacctcccactcccatctgctccttcctgaggcttccctgtgtaattaaccatccaatctaccatccacccagctggttaaagcagaaacctatgaatcattcttatttctccttttttttctcccaccctgacctctcctgaatccaacgttagtaaattctatcagactaacacccagaagataccttgaatcagctcttattaccttttctgctacgattctgatcaaagctgtatcatctttcagctgaaacactgaaaaagctcctaactgccattcctgtttccattctttcctttctttcttcatctttatacagtctccaggttgatttttaaaaaaacatacagcatatcactaccctgcttcaaacccttcagtgcattctattcctcttaaaatgaattcaaagctccttatcttgagccttatgatctgcacctggcttattttccaacattaccttataccattctcaccctcactccctgtgcctcagccatatcctggcctcttttctgttcactgaagatgacaagtcatttcccacttcatgctctttgaacttggcctggaatgcatttcactggctcttcacaaggctggttccttcctgtcatttaggtcccagttgcttcctgagagaagccttccatggctacttcatcctaagtgatccacctctgcttattctctttcatataactctgtttcttcacagtgcttttcaaggtctgtttaagatttttgtccctttcttcattgtttgtctctctgtactgtaatatgtaagctcctacaggacaggaatctcttttgcctttttaataagtatttctaccttctgaaacagtgttgaacacgcaataggcacttgataaatatttgttctcaatgaatgaatgaggtcttgagaaattagtaaatttattcataataaaaataaaaagtaccatttactgagcatctatactatgccttttgctaagtatattaagaattatctcacttaattaattatctcatttaatttttaacaacaacaatctgagaggtaggcaatgttatcccaatcttataaaagaaggaagtgagagactgaagttgacataaattcatacaggaagcaagtggtagtgcaaaaatttgagcttaatcagtttaaccccagagctcatgcttttgtgcttatgctattcttctccctgtcagaaaaaaaaaggtaaataaattttcacagtatataaagggcagcatctgcttatgaacaggctggggcactcttgtggatcttgctatgtttcttcagtgaggccaacatgaaacactattgataatactgtcttatatttatgtcccgagttctttaaattttctaaagtatgcgctattttattaacttctttggtctctactcatgtgctaatttattatatataacatataatatataaatatatataatatgtataatatatatatatattctatccaccctttcattcgttatacacagtctagataggaaacagacagcttatatttaaagcacaaaaactgtgagaagtgtggtatgcatgaagacctaggacaaccaggggaagaatgaactaactctgttggacaattcagagaagtcctcatcatggagatgacatttgaagtgaaacttaaatcttgaatcatgagtaaaacgtaccaagcaaaaaacagacaatttgatctttgacgaacctgacacaagcaatggggaaaggattctctatttaattaatggtgttgggaaaactggctagccataggcagaaaactgaaaccagaccccttccttataccttatacaaaaattaactcaagatggattaaagacttaaaataagacctaaaaccataaaaaccctagaagaaaacctaggcaataccattcaggacataggcatgggcaaagtcttcatgtttaaaacaccaaaagcaacggcagcaaaagccaaaattgacaaatgggatctaattaaactaaagagcttctatgcagcaaacgaagctatcagagtgaataggcaacctaaagaatgggagaaatttttacaatctatccatttgacgaagggctaatatccagaatctacaaggaacttaaacaaatttacaagaaaaaaacaaccccatcaaaaagtggttgaaggatatgaacagacatttctcaaaagaagacagttatgccaccaacaaacatatgaaagaaaagctcatcatcactggtcattagagaaatgcaaatcaaaaccacaatgagataccatctcactccagttagaatggcgatcattaaaaagtcaggaaataacagatgctggagaggatgtggagaaataggaacgctttttcactgttggtgggagtgtaaattagttcaaccattgtggaagacagtgtggcaattcctcaaggatctagaaccagaaataccatttgacccagcaatcccattactgggtatataccccaaggattgtaaatcattccactgtagggaacacatgcacacatatgtttattgcagcactattcacaatagcaaagacttggaaccaacccaaatgcccatcaataatagactggataaagaaaatgtggcacatatacaccatggaatactatgcagccatgaaaaaggatgagttcatgtccttcacagggacatggataaagctggaaagcatcattctcagcaaactaacacaggaagagaaaaccaaacaccgcatgttctcattcataagtgggagttgaacaatgagaacacatggacacagggaagggamcgtcacacaccagggcctgccaggggctaggggacaatgggagggatagcactaggagaaatacctaatgtagatgatgggtggattggtgcagcaaaccaccatggcgcatgtatactatgcagcaaacctgcacattccgcacatgtatcccacgagcaacagatgctcatgatggttgtaaaggatcaactgtattttaaaacataatttaatatatacttttaataaacacattcatattgttcaaactataacccatagatttttttgtttccttttttttaacttttattttaagtttaggggtacaagtgcaggtttgttacataggtaaacctgtgtcctggagatttgttgtacagattgtttcatcgtccaggtattaagcctagatttcttagaaggaaaaagacaccaaaaatatgttcttaaaggtcaagggctgggttttgtatgatagctagaccattatctgtaggatttgagaccctggtcaaagaccataataaaatattaatctttgctgaacacattcacttatctaaccatctagtcaaaatagcttatgcgctgcatttttaaagaataacaggtggccttttgtcattttatgcctctctatctgagccaaactatataatcatttgcattatacctttggctcaaaaacgtttatatgtttaggctatcaaggattatttttaatggttcctaaatcattttaatcctcagaactactttggccaatatttgtctttgttaaaagttaaaggtgagcactcagtattatgtgaaaatgaatgcaatatttaatttttagttttgtcctgttaacattagatgatgcccagatagtaagtctttttggtaatgtaatcagtggatgaggaatctgaccattgttgaaggttttgtatataagaagtcaatacaacattgaccaaaatactaaccagccagagaaacagaatcctaactatttctgaggaaactgtaagtagaacttctgctgaacaaaattgttatttgaattattagattttttctttatcccaagtgatgcatttttaaaggcttagatatttgttgcatattcacctgcataaatgtatctgtttaaattatggcttattcctctaggatttgatttattttattcttttttttgtatggacatgagactcttaattatggaatgacaaatttgtttattattgcaattagtgcctaatgtgaaagtctcataatttcttaactattgaattacaaatttgtttattaagttcctaatgtgaaagtctagtctctgtgactcttctttttgagaaggaatagatcagtaatctagtgacatataattggctgtattaatatgytatgtttaatatttaatatcatccaaatcaactgctgttgaattgatcattattaatacgattgtgaaaccttataggctattaaaacatttatttaaattataaacttttcaaaacagaagtctagaccaaattatataaatctccctggggatgtccctataaaagctggcccagggtcatactgaaggagtattacagtggggaagaacatagcctttggaaatagactagtttaaaatatgggctccactactttctatatatttggttgggcgagtcctcttttagccttaccttgcttatttgtaaaatggataatataatgctacctacttcatagagttgctatgagaattaaatgagataatagtcataataactatatttaactaacgtttatgagatgcccagcatgttaagaactttacttttgttatcataatgarttcccctaacatagagaaatgtactattacaggccctgttttatagatgagaacactgtcttagcaagatagttcatttcacgtataccatgttgaacacacagtacagcacacagtgagtcctctgtatgtgttaattactggtattttcctaggacttggcaacaagcattttgagaaatttattctgcccttgaacatctttgagcccattgagatgttctccaacgcaaacagtaggttaagygtcctcactttacaatggcaaatcacttaatggaggtcatgtgggttcctgaaatgtttgatgaaagcctctggtttgaatgttacaacactactggttagtctttatatattagtttatctcttcctaaaatatcacggtaaaaacaaggcttagttaaaaactgatttttttttttttttttttttttttgagacggagtctcacactgtctcctgggctggagtgcaatggtgcgatctccgctcactgcaacctccgcctcctcggttcaaggactcttgcgtctcagcctcccaagtagctgaaattacaggcgcgcacacccggctaatttttttgtatttttagtagagacgtggtttcaccgtgttagccaggatggcctcgatctcctgacctcctgatccgcccgcctcggcctcccaaagtgctgggtttgcaggcatgagctaccgcgctctgccaaaaactgatttttaagagatacccttaaatctaatcctatactaaaccagtgggcaaactattagaccagagggtcagatttaggccttgagagttctggtctggttttactgtaaatcaggaactatgctatgtgctctgcatgaattactataaacgggttttcttgaaatattatcagcaactgggaagtcaccacttttcaaagaattccacttgaatccaaagatccaaatattacacattcttcactgtattcaagtcaaatatttctacatatgatctcgaagtattgctcctaacatacaatttctcaataaatatttattgaataatttatttctgacacactaaaaatgaagtgatttaaaactgtcctctacatggcttcccttcaaatatttgaggacaatatcacttctctattgaagctttttcaccagcttaatatctgaagattctcaaacttataatcagtgactacaacatagaaggaagttcaggtgttgtgggcctaataccaaatattgtctataaggctaggtgtggtggcttatgtctataatcccagtgctttgggaagcccaggcgggaagataccttgaggccaggagttcgagaccagtctgagtaatgtagaaacacmctatctctaaaaaaaagaaaaawaattagccagatgaacacctgtagtcccagctaccctggaagcagaggtgggaaaatcacataataacctcaaatcagtaaatgtttatggaataactattataaacaacatttaaaatcaccatgattactttgaacacacgttatayagagattggatatagagaagtcaaaggcccacacatccctcacccaaatctgggctctcaaaataagcaggcaaaagtcttaaacacaaagcataataaggacacattgttatgccaattagaggctttttttttttgccaattaagattaattcagtatggcttgaaaccaagtggaaaatgttcttaaacaaaaggaatcaaacagtgaaaacaagttaagcattaaaagcttaaacatgttaagcattaaaacatgttaagcattaagttacctgtgctgacatccatatgtctcattttattgcccaatggaatataatcaaacccaagcattcctctacttagcacaaaggtaaaattggcataaaatataagcattatgaaagtataatggattaaccatggcacgggttattcttttctttcaggcaggtccaaaatgtggctgcttttaacaatggcaagtttgatatctgtactggggactacacatggtttgtttggaaaattacatcctggaagccctgaagtgactatgaacattgtaagttactctgsggaaaaactctataaaactaaaagatgctattatttaaaatcataatgagttaaagattttatatgaccaattaaaaataaacagtaatattcatttattagatatatctaaaaatcaactaaaatttaaacttttgggtttgcttcctcagagtcagatgattacttattggggatacccaaatgaagaatatgaagttgtgactgaagatggttatattcttgaagtcaatagaattccttatgggaagaaaaattcagggaatacaggtatatataagcttcttttcttccttcctttctctcttttttcctttccttctttcttcttccttccctctctcctttcttcctccaacttttccttcttttgttcttccctttttcctccttttatttcttgctaaaaatgtaatgtcttgctcattctggaaatgcaaaaataagctatattttcagtcttcaaggagatcatcatcaagccaatgaaatagataagtaaatgagtgattataataatatgtgataagctcaagctacaactgtacataggatattaaactgaaggttttaataaaattacctaactcagctaagggagtcaaggaaagctcactctcagaaacagtaactggatgaagatctaaggatcaggaagagttagccagggtgtgtgttgcagaggggaagatggggaaccaattcaaggctcatttcctaaacacatacaggctaattttcactagtactattaaaaatttaccttttactcattgtagaaatgttatgaagtacaaaaagaaaaaaaaaagattactcgtaattttaccactcacagtttaccaaatttaacattgtgctgaattacctgagaatataattttttcaatagttttattgagatgtaactggcatataataagctgctcatatttaaggtgtgcagtttcataagttttggcatctgagaaatcaactccctgagaaatcatcaccacaattacgataagatattcaaaaataatcaactcaatcaggcaaatgtatttagtgctagtcatatggaagactgtttctagcctcacatttatcctagaataaggaatacatttataaagtttataaacattttcttccttaggccagagacctgttgtgtttttgcagcatggtttgcttgcatcagccacaaactggatttccaacctgccgaacaacagccttgccttcattctggcagatgctggttatgatgtgtggctgggcaacagcagaggaaacacctgggccagaagaaacttgtactattcaccagattcagttgaattctgggctttcaggtaaacaaaagggacaattaaaaataaacactgggctttaaaagcataggcatttgccccttctaatccagtcccattttaacaaattacactccaagtaggaggataaacaagtcattttcattctaatccattcttggattcttccrtgtacctcattcctagggtagcttttccttcaaacttttgtgatctcaggagtctccattagggatttccagaaagtgattttccaaatggaatgaacaatatggctgaagcaaggaaactcacagcccctggaaaattccaaaggaatgtccatatggattcaagagagaagtaaaaacccatttaggggtaggagaacagcaatctgaatcatcatcaataggaggggtggggagagtgaaattcagatatcatggagagattatcatgggcttctctcactggtcttcttgtgccttattcctggaaattactgatggaggtagagaacagaacaaaacctggctgctgatgctaaggcatgaaagtgttycaagagttctaggagctgaaaggaaacctgtgtgtcccaggtgtagcgggaaaagggaaaatgacatgagtgaagactgaggtgcagatggggcagtagtggtgatagtgagagccttgggcctcattctgagtgcactgagaagttttaaaaagaggagtggcataatacagttttcattttcaaaatatcatgttggctgatttgtgaaaaataaaatagagaaagayaggatttatattaaatgacatggaacacagcatacacattattattaaatctgacatttcatttcagggatagaaataattcccacctacagatactatcttgtttggattcaattgtggctgcaatgctgcgcttcagaaatgatgtcagttgtttataagaagctgccccaaagggcacctgacatccactgatggtctataagcatcaatgtttagagaatccagttttctgtatcccaaagggatcattagctataaatgcttgaattttagaaacaatagcaaggaaatgtattcactttcattttgtctttttcctttcagctttgatgaaatggctaaatatgaccttccagccacaatcgacttcattgtaaagaaanctggacagaagcagctacactatgttggccattcccagggcaccaccattggtaagtaatggcagtcaaggccaagtggtttacttctcataaacacttycccagtggttatggtaggcatgttagcaaccacactaattgctttccattcatttaatgcctccaacaacacaatgacatagggacaattataattcctattatatgggaaaacaaaacaaggggatacagttcgtgcaaggttacatggattattaccaatagggtagctcaggcagtctgactcccaagcacatactctgaagcattataccatacagccactgacctaagtttattctattcatttgaccatatttatggggcaggctcctatgatgtatcaaaagaatacagaaataaataaaatagatgaaaacttctgcctttgtaccatttatactctagagataggaggcagagaaaataaaaaaggttaaaaagtaaaatgtaatatattttagataatgctaaagctatggagagaaaataacccagggaattacattagagagcaccagaggggttcacagaaattgtagattggtaacacaagcactctttgggtaaagtcatgatgaaggtcagagagtgagtcatgtgcctacctagtaggcatcagatgttccaggaagacagaatagcaagtgagaagaatctgaagctggagcacacctagtttgttcaaggaacagcagtgaggctatgccttgtgtggatgaatcaaattgagaaagagacagagagagtgagagatgagatcacagatgttggggaggaaagactgttcggggctctttggctgttgtagggattttagctttcactctgataaaaaaagaaaactgcagaataattttgaatcgaagagttacatgattcataacaggatcccttttgttgccaggggcaaagagscaggagcagagaaccaattagaggactcttatagtacccatgcaggagatggtggtgacctggatgaagggtgttcttggaaaaaccattcttccacaaatagaaccagactacatattatatagttgtctatatctgaaagggttttttttaggccattcttgagtatcatcgatatgtcattattgacagtgggagggccttgcctatgtagctatactgcagcgttaaacttgataactacttgatcacatcctcatctgccagtatactactgcttacaaaattaattcattactgaatgtatttactatgtatagatatttgaattctcttgggtccttatttatcaagcatttactatgtgccaagaatcatgataaattctttctttacatgatttacttcctttagttcctaacaatctaatgaagcactcaccactatccttgtatttcagagagggaaacagtggttcttagagattaggtggcttgtccaaggtcacaaagctaataaaccacagagccaggattcaaattgagtttggtcatatttaaatttctactcttaacctttccacttatatactctactcatattaagtgttaattaattatctcattgtaatgagatacatttaaattcataaaaaatataaattcataaagaaattcataaaaaaattttttgtaaccatatgagtatcctaaatttggtctattttctaaggtcagataaaggtttatgataacttttaaaacgttccagcctcatgtccccatagaaaaatctatgaaaataaaacaaatataccaaaatctaatcactgagccagcagagatgccaatttctcaggctgtctcaaacaccatccttagtaagtccaaaataatgtcacacttataaaaacaaacaaaacaacaacaacaacacacacacacacctttttcaccagttccttgttctttttcaggttttattgccttttccaccaatcccagcctggctaaaagaatcaaaaccttctatgctctagctcctgttgccactgtgaagtatacaaaaagccttataaacaaacttagatttgttcctcaatccctcttcaaggtatgcaattctctttaattaagtgaatctaagacccttgattgcccatggattttaaagttatagaaagagaacagagttataaaaagagaacaatcatttttatatccaaaaatggaactgttcgcatctgtattatttcttccatagcactgaccatgtttgaatctccttacagcctgcgagatccccctttctttctttgttcttcatgtgagtcagcaatgcctgggagtagttttgctttttcacagatggtttgtttattaagcactctacacagttgtgtcaaggctgtgattccactccaggaggagggaagatgaaataaaaacaaaacaaaatagtcaaatgagaagactaacccacttgggccagagagactggaaagaggagggaaaggaaggggagggaaagggagaaaaggaggaaataaatcagtgattgagtgaggcaaacaccttgagatctctcatggctttcccttttggctttcctaagagctccttcatctttaaatgggcgatctcataagtcagtggtgtggatttcaataaattataaatattaagtgccttatgcagtaggcacacatgttatggaattaatcgttttgtttgacaatgcttaataccctaattctctcacccagtaaaaccaacacacacacacacacacacacacacacacacacacacacamwctctctctctctctctctctttcctttaggggaacggtttagcctcaggttataaaatataaggattccatttccttctatggttttgtactattcatctcttttcattctgtattaatatgtatgtctaaagcctaagagaacttacctataggcaaactacatttggaaaacttttattaaaatctaaaattttttgatggcccagaaatatttattggctacattgattgagaacttatttcctactcatactcagattttctgataggcaatgcagacgtagattaaaatttagaaaagcaatagacctcaagttagaggcttgggtaaggattctaggtataatcgagctctaattagcccaagaccctaactcatgttaacctcatgtttcctcgtgtataaaatagagatgacaaaatatctgccttcctcaaagagagttggggcaaactctttcaattcttatactgagcctcattgcctctgtaaaggctttgctgaaaatatggccaagtcaccatttctcctcccaaacttttcacaatttattgctgaaatctcacatcttggcacttcattatgacagtctgtcatgtgtttttaagattttatcccacaactcctatcaccccaactagattgtaactctttgtgtcttatacttcctctcagcagccagtacagttctcagtgccacaatagatacctagtattgatatctgtgctgcccatttcacaactttattagggaattaactaaatgaaagtattggaaattcctaaaacaacatgtaagaataagaatatatcatcatcctcatcacacatgtataagtagattagataaactagtgagtcttttctgcagcttgattgctacaaccctctaatagtgcctttatttttcagwttatatttggtgacaaaatattctacccacacaacttctttgatcaatttcttgctactgaagtgtgctcccgtgagatgytgaatctcctttgcagcaatgccttatttataatttgtggatttgacagtaagaactttaacacggttagtatgcatttcaatttctatattttgagcaacatctttgattacttgtttcattgccacttagaagtggtactttatgagaactaggagtaggttcagaactgcgatatcctgataaacatgagagaaatcacaaatcattgctcccaatttaatcacttccagcatccttccatcaccccagttgcccctaaaccaaataaacaacatgaagaaaaaacacaattcactactcacttatgaccacctaaatactaggtgttacatttaaattctgtaagagaaaggactgaaccatatattttagcaggctcctttgtgagaaaaatgtctagatattgaataaatgttttcaataaatatttctaatgctgacagtcattttgataaatcttacagactatatttctgagcaactatttatgtaagactttgcccatattctttttttgagatagagtctcgctgtcacccaggctggagtgcagtggcgcratctsggctcatagcaagctccgcctcttgggttcacgccattctcctgcctcagcctcccgagtagctggaactacaggcgcccgccaccacgcccggctaattttttgtatttttagtacagtcggggtttcatcgcgttagccaggatggtctcaatttcctgacctcatgatccacacgcctcagcttcccaaagtgctgggattacaggcgtgagccaccacgcccggctgactttgcccatattctttatctaccttttcattcactttgtattgagttggagtttcaaaacatatggacaaaatacactatcatagttaagagtatggatttagatcagtttaaattcaaaccctacatttggaactgacttaaacgtctctgtcttgatttcctcatccacaaaatgggttatygggaagatcaaatgagctagtatgtttaaagcatatagaacattgtacaaagcatatagcacatagtaatagcatataaggttttctactactattcatagacaactatctcccctccaaattgtcactttagttatatacccttgaacacctaagaaaattacatctattgataagaaggtataattctatgaagtgttgtggttacttgtcattccatatgtggagtttaacagagagtagcctgtcctcatcacacgaacaaaaggcagaacaaattactgtattccattagtgagagtcttataagaaaaataatagtaaaataagacaaaggaaacaaaggaaattagagatttcatcttctgcgtaataatttgcagaagaccatcttcagtctccaatgaagatggccaatttgtttcactatggccacagtccgctatattaatggcattaagagtcactatgaagtggccttctgcaactggagaaaggaacttcagtttgttgcttggggttctgcaaagcaagaggcctgtgtgtgaatatttaacctacagcactctagcactgggtagagaagcataaaagctgagaatttagactcagagacccaaattaaagtatctgtctccattctgtgtggatcttggacatttctttaaacttctttgtgccccaattttcatgttgataaaatggaactaataagttctcctcattaggcagctacaaattaaatgggttaacacatgcaattgcactttgcaaattctgaagtgacatacaaatgtgttgttcatatccttccagtaaatgctacctttaaacacttgacctgaatcagaaaacataaatctttactktttttaagaaactgagtatgtgtcttagtatgtatataatatgtgtgtctgttgatttctagagtcgcttggatgtgtatctatcacataatccagcaggaacttctgttcaaaacatgttccattggacccaggtattcttttccaaatgctgttaaaatgtattttgtgagtctcaacccttttcactttacctaaacacattcttaaaatatcctgctgagtacacctggaaggtaatttttctggcactgactaccatacaaaaataactatgaatttatttcaaagaagaaaatgctttttawtttattttattattattatactttaagttttaaggtacatgtgtacaacgtgcaggtttgttacatatgtatacatgtgccatgttggtgtgctgcacccactaactcgtcatttagcattaggtatatctcctaatgctatccctccccccagcaaatgctttttatgacttggtatgcaagaaaaattattttgagtgaagctgcatttaaacttacataaataccttgtcctagattattaataatcttttggaatgagaaaaatgtttcttaataattgtttaaattgaaaataaactgcttggaaatgtttgaattttatttttcacaatataataatttttatttgtttgcttttaatttctctatgttaggctgttaagtctgggaaattccaagcttatgactggggaagcccagttcagaataggatgcactatgatcaggtaagcttcttaaagatggaattattcacattttgaacaacaatactaactatttaaatgttaaagaagaaattatgttaactgcgcatctgttttccaaaggaatgttgatgttctgtctctcattctcccacatgactatgcattcctgctctggtggctaygctcatttaaagaggtttacaaagctgccctcaaagtactacacccctgtgtgtgagagacttcccaggacttaccactacccattgccattacacagacctgtcccatatcccagatccccagcacactgtcctctcctttctgaagtactaatacctgatataataagctaataattctaactgttcatggmatttctggtcttcttaaacaataccctttcctttgttgacagccagaggagtgatttcaatgggatatattcccaaatagaagaaaaagatgccgtgcttgcaggtcaaggctggaaatattttacaataggcagaggcctttggcataggcagacatattaagcagtcctcacacttgctgtaataagaatccagactttggagcttatcttatctgcagtcaatatgagtttgggcagtcatttcttcatctctccacccaggctcaggaagttgttgacaggatttagtgctataatatctataagctcttagctcagggtaagctctcgggttatcactgactatttttgaacaagggaagcaccctatagtattttgtaaccttctcttcttccttttcaccacatccaatttttccatccaagtagtagctgaacaactctactaattttcatttgtttccatgacttaaaatttagaaggaatttatatgttttaacaacaatgtcttatgtgtagagaaggtgccccccaaccttgattttgcatttttgatatctttaaagttttcagaatagcatgagatcaaacttttgttgaaaacattttttcctccaccatcactttctcaaatctccaaaacacacaggcttgctttgagtctctctttctactggactctaatactcataatcagaggacttcatcttagaggaacaagaaacccagtccccaagtccacccttcttccaactaaaccaataatataccaggttggtctttaactaactgaagcaatgacactaatttaagagccagggccagcatctagaaaactctttgaataataggatgtaagtaaaataarctgggtttataattatgaatattctccacacactcccttttctctaatatttaggaaatataatagaaatcatgaaaatattagggaaaattacatatcataaaatattttgctatggcaagttggctattacacaaaatgtgagaatacagaaacttttagtatattggattactattcttgaaactatgatctaaaaaaatctaacaaaattctctctgggcagcaagaaaatttgagataattctcttattcctttttctgctttgtaaacctctttaaaatctatgtgtgaattgtgattttcgagaaacaggacatggggatgataataccctttctcagaatttgaagcaacattttgtaaatactcaggtaagtattcaacaattacagctccataactgaaacaactgacctatcccctgaccataactgggaagtcaatacaaagccaaaataaatgactcaggayattttgagatcatattttagagtgtttgggtagaaacaacctattaacaattagaatctaatcaaatccatttcccttagcttgagttgcaatctatgttcttaatttgtaagacttactgtccaaagccttgctattcagagcatggtttggagccaatggcatcagcatcacctatgaatgcagaatctcaggctgttccccagatctactgaaacagaatttttacttcaacaagatcttcaggtrattcacaggcccattagaatttgacaagcacttatctaaaacatattgcattcacyttgctctgtggataaaggtggttttctctgtgcaatcattgctagaattcacttataaaaccgccagttaatgttatacactctacttgaatagtaagtactgggtttaaagtgtggttacctaaactctggttctttctcttgtgttttctagtcccarcctccctactacaatgtgacagccatgaatgtaccaattgcagtgtggaacggtggcaaggacctgttggctgacccccaagatgttggccttttgcttccaaaactccccaatcttatttaccacaaggagattcctttttayaatcacttggactttatctgggcaatggatgcccctcaagaagtttacaatgacattgtttctatgatatcagaagataaaaagtagttctggatttaaagaattatccgtttgtttttccaaaatactttattctctcatacayagtattttcataatgtttgacatgcagtgcttctttctgtaattttgactttagaaatatattggcatcaacaaacttccatttgtcattttgaatttttttaatttaaagaaatttgatttttcacctggaaatttatctagaaatacttgagagaatatatttctggggaggtgaaacttctcattttcccattcagtttctcttctgaactcacttatatatgagctgtgagccataagtgtttctaaaggacagtgttggcttcatattcgctctgcttatgtacacttgatactgagtatattgctttctattgttgatgaagctaagtctttccatctgtgtagtggggcctatcacttgctattttgcatatttaaccccatggaaaggccaattgggatataaactgaatcaactcactttcacttcccagggagtggagagcaagggtagtttgggaagcagcagatgaagtcaaccctgagtcaggaatttgggaagaaaagggtatgctctattattattattattattattgttctgccctcatgtttttgggtcttgaccaccaaataggcaccaactaaccaaactatttttgaaatctctgccacagtgctggaaaccacaggatccagaaacatccccattgatatatcaattaggatgtacaactgccatcagtaacaacaaaaaaaaaggctcacccaaactttcaaaatttctaaacacacacagccttaccttggaaattttattaaccccacaaatttgtgacctcatattttatgcaattaagttattcagatcacacctattatactatgttacggtttgatgtataaaatataaatgagataaggaatatcttgtacccagcatagtgtataaaacatagtgagtattcacaaaaacctrttaacaatgtttattatattgtcacatccctcaacctttgttaggaagccccaaacttaatttgttttaagcaagaaattgctaaaagaagataacttgggagactttatttcaatatttcagtgaactttgttgttagactttactaaactgacatgaacatgtcggtgactagttacaaatgttcatggtggtggaagcagttgaggactcagatgttttatcaactctacttcctcgagaaaagaacaatcattagattcttgcagtctcctatgctattccagctaactgcctttcttttagtcggtactcagcagatacaggaagttttggtttggattttgaacacaattaaatactatcttattgctcctacagcagctttgctatctcccatttgttaatttgaactgtcaatttatcagctaattttcaagagtttatttctatctgcctgctgtaatcacaattttcaagtgtttatttctatctgcctgctgtaatcactccttgggcaacctcctgccatgtcaaactcaatcatttcaaactcaaattcatcatccccacatctctgagccaaataagtgtcaagttaatgaagttctcccagtaaccagggagtgagactctggaatcaactttgaataccgcctctcctctagttatcctttccctttgtaaaatagaaactgttaaacatagataattttagacagaacagtttaataatcccctttgtatgcattactcggtttcaactattatcaatacatagccttctttcataatctggttttatctgtatctctagccacttctctcatcttaatttgaagcaaatctcaagcatcacatatttcatccatgaggatttcaggatgaattactaaaagataaagyctctgttttaacataataatactgttcttacatctaaaattttaaaaatatctagccagtgctcagatttccaattatttcattaataatgtttatttatgaaatgttttatastttgtttagattgaaattcaaataaggcctttatcttttattacttgatgttgtctcatgtttctttagatatacaggtccatttgcccttgccctttttttttttttttcttgagacggagtcttgctctgtcacccaggtaggagtgcagtggcatgatctcagctcactgcaacctttgcctctggggttcaaaggattctcccgcctcagcctccccagtagctgggattacaggygcacaccaccacgcccagctaattttgtatttttagtagagatgtggtttcaccatgttggccaggctggtctcaaaatcttgaccttgtgatccacccgcctcagcctcccagagtgctgggattacaggggtgagttagtacacctggccttgttgttgtttttgttgttgaagaaactgtggtttgtgttgtagtttcataccataggaattttgctgattatattccacattcctcgcctttcatatttcctgtgactcaagcgttcttaacctcaacactattgatatttttggtaaggtcattttttccctaattgaatattcttttctaattatttttatagattcagggagtacaagtgcagttctgttacgtggatatattatgcagcagtgaagtctgagcttttagtgcacccatcacccaaatagtgaactttgtacccaataggtgatttttcaaccttcaaggtaatttttttattattggagttgtcctgagtattggaggatgtttagcagtatctctagctagatcccagcagcacacacatcccaagttgtaacagtcaactatgtctcctgacattgccaaatatcatcttgatggcaaaatgcccaccctactaagttaagaaccagtactgtaaattataaccttaataagattaagatttwaaaaaaaaaatattttatagaccgtatggtgttctactataatgaggctgacaatgcacagctgtttctcttttttagaatgtcagagactactgcttttcaatacacaaacccaagagttaattaggagattaaaaatggtggcattccaatttgatcagttcttcrtttattaactgaatacttccataaagaggaattgttgtcacatatatttaagttatccaaaatccatgattctttccctttatttatgaatttccaaaattggtttttcttcgtttagtattataataaatatatggttctatgcatatttgatgtttcaaatctgtaaggattattatccttactgatattaaaattataccctctgtttcttgtgagagcttctataagttggctccaaagttcttttaccaaacctgtcatcctgaatgtttgctgcttctgctcagttatttccctaagaggtcccrattcctttttaatgtggaattttacaagatcatattctataagtgaggatgatcattgttattaggtcgttatttgtaggacttttcaatgcagagacctaggaaatttttttgagataagatatgccagtacttcatatttatttatttgtcagttaaaaaaaaaaacctcagctcttcatctccttctccatcatgatagctgtcaacacacaatgtttgaactgttaaagtagcatcttaaatggtctacctttctcttgcctctgcttaacattccaaattgattcctaaaatcctcttcattgttccacctaagttcaaattggtcaacctaccatgtaaaatcctcataaagctggttacttacatatactatctcttttccaactaccttaactagtagccgcccttccagtcaagttttctctttattatgcctcaaatacacctctaaacttgtatcatcatattgttgttcacgtttccctccaaaattctgtctaacactgtcttgaggctgcaggtagttttctatgcttttgtgcataactcacatgaaaaccaatacatatgaaccgagaaccgtgttgcaatctaaaacccactagaaataacatgactcatatttttaaaaatcatggtattttagaatttgaagagatctaagcagttatctagtctaatcctattattttccaagtgaggatattaaagttaatagaagttcagcactttgataaaggtcatacagttggcagtgttagagatggaatcaacatctcctaatccaagtattcttctccttttgctgcacaaggctgatatgaaaagctctgttacagtgtcagatatttccagagttgtctgcgggagaaaatggaagggggattgctaagggttttagcaagtattattcagggtaatactgagtatctcagcttctagagtgtacacagaaatctggtgaaagaaaaatgccagttgaatgtaagctttctctgaaagtgtgagagaaagtgagaagtagcagttagatattagaaggaaaaagcaggaatggaggcaagaaggaggtaaagaaaggaagatattagaagacatagaaagggacttgagcttccaggtgcaaacattacctgcatatctcagttgkccattatcctagccctactggaaaaattctaaaagctatatataatctaagccaaaccagaaaaagtatttaaagcatacaaggaggatgccactctagaattttcttttgaaagtaacattctgaaaaacaaataaaaatacagatgaggccaggtgtggtggctcacgcttgtaatcccagaactttgggaggctgaggtgggtggatcacctgagatcaagagtttgagatcagcctggccaatgtggtaaaaccctatctctactaaaaaaacaaaaattagtagggtgtggyggcacatgcctgtaatcctagctacttgggaggctgaggcatgagaatcacttgaacccaggaggcagatgttgcagtgagccaagatggtgccacagcactccagcctgggcaacagagactgtgtctcaaaataaataaataaataaataaataaaaataaaaatacagatgagattaactatttgctgaaataacccaccctgcgaagtagtttacaagtgggttgctgatgataaccgtgagtccaaaatttcaaggattttaaattatcactaaaataaactattaaacaatgcaaagtatcataacaaggtaatcccataataaaatctatagtaggtatggataaatgaaagcctaaaacagagtattctagccagtgtgaaggtggagaagaatacatacattttcaagcaacccgtttaacaaaattgttataaacacggagagtcagagtgacctggattcgagttcctggccagccatttaataaatgggaaaagttattaacttcatgagctttaatttccttcactgaaaatagtgagtgtatacctcccagagttgtgaggatttttgtgtttatttcttgaacaaatatctattgaatggcttcttyatattgagcattttaatataattagcgtatgatccgtggtattgcttaattaatattacccaccattattggttttataactgcaaggtattacttattaggattattattcctttgctcttacatattagacaatcttcttataataacttataggctattataagttattataacttatagtaggtgagtcaagatagactcatctactaaatgggaaattggtagagcagcctatataagtatctgattacagaacaatggataatttctccgctcacataaaacattgatactctggcttatcaggtcttctttgtggttttgkttcatataaatcagttcctagaagtctgattacctttcagtaacctaataaaagcatattcataagtgtgcaaagcaaagcttacatacaattattgaaccaaataaggccaaatctcagaaaccagccagcttccatttaataattttattttaatatttacattttgtcacttagtaaattatatttctctgaattttaaccttcttgtgtacttacttcaaggtttgttttcaagaccaagagcatgtgaaaaattttgtcgtcctgtattcatttggtttctctgctcattctgcccaggttctcttctcatctgtttatatcatccagttatatctgtgagtttaatatttaacttacagatatggttgatctggagagccagctggatgatatgaattgccatatctgtgagttcaatatttaagaaaaacatctatgcttttctaaatttcctcaaaggtcttcctataagtgctaagaatyccttgttctttattggagtaaacccaattcatgtgtgccagtagattacctgacttactatcttactgttcaatttatgtcactgtagctaagtcagtacctactaattggaaaggtatgatccaagaacatttactgggagttgggtggctctgctttgtgaatccttatctcaaatattttagttaaggttataagacactgaagataaagaacatatgctcattatgtgagtgtatatacgtgtgtgtgtatacactatatatttgtaaatacacatttacaaataaatatacttctactgagaatgtgtgtatccagatataggcacacagaaaaagaattacatttctttcaataaatattttgacaaataatttcaatcatctaagctttaatattccttttctgagagcttcattaatgtacattctagtgaatttagaattctgtgcttcatgccttcattttgcagcacctcacagcaagtacttactattctttagaattccaaaagctacttgaattcaaaacaggtcaaatcagcaaaggaggttaaaagattagaagatctgcaaatggtttggctctaaagcaagttcaaaccaaaaatgagctaagaaggcactggaaattgtatatcctggggctatttaatatgccttctgccagatgcatgtcaaggcaatgatacaaaatgtgactgaacttactaacaaaacaggccaaaaattgatctgattaaatttaaaataaaaaaatgcttcttggcctattaaatctgcactgcttgggaaagatatattcatttgataaatttaaatcatatatattatattgatatttgtttaatatttatgtctaatgaatatttatcaaaacaaacagtgttctttttgttctaggaacaaaagacaaaccccttgacctgacagagcttacattttagtggtggaggttgataattataatcagatatattattatattaggtaagaataattgctgataaaatacagtaggttatggagtagaaatgaatgacaaaaggcactatttgttttttcttttttgaattattatgggtacataataattgtatatacttatggggtacatgtgatgttttgatacaggcataaaatgtgtaatgattcaaatcagggtaattagagtatctgtcacccaagcattgatcatttctctgtgttagtaacaatccagttctaattttaaagttattttaaatagacagtagattattgttaattatatcaccctattgtgctacagaatattagatcttattcactctatcgagctgtatttttgtgcccattaaccatttccaatgtatccttacctccccactacccttcacatcgtctggtaaccatcattgtactcccttcatctccatgagttcaatatttttcatttttagctcctacaaataagtgaaaatgtgagaaatcygttcttctgtgcaagatactattttaaatagagtggtcagaaaaagctcccctgggaaatgacacctgagcagagaagtggctaaagtgagaaagatccattttaattgagtgttctggtcctgtagttctaaactgcaaaggaccccaaagagtcttataggctaacaaagtagcctgccacaatttcacagatgctggcaggagacaggaaactcttgggtcaaagacaaaggacttgtatcacagcggacctcatcaccttcacgttctccttgttccacaagtccatagagaagatgcagaagtggacccaggtggatgttgcacatacaataagcctatgtcacagtgaagaattccaagtttaggaacctcccaatcttataaaggggctgccagcaaaactgtccaatctttgccccatatgaagacatctttattatactggttaggaacaaatctaccctctacactggagggagacggtcttctgtctttcaaggcttttcactaaacacacatcattgaaaagatagtctgggacaaaaactgatctgagatatgaagaaatgccctggagaatagtctcctaacatcaacttttagcatacaccagaatcacctggagttcgccawtctccagtgttcctgctttagtaggtctaggccctgtctaagaatttgcatttcaaacaagttcccagctaatgctgataccactggtcaggaatttctactttgagaactactgttttgagtcttaaacagatcacattttgttgcactatcgttgatttgctttcatttggctgtgctttataatcagcaacccacaattctagattacttaggcctattattttctttgatttcattaaatatagtgaataacatatctcttattagagacaactctcatatcttacaatgtggttgagcttattgacacatatatttcttccccaaacaaacctttgctagtatcaacttcagattatccagatgtgaaacaaaggagacaattgaaataatagagaaaaaaaatcctgcttctgagggtatcataataattgtaatattaaccttgtatctaacgttagtattgatgacattctggtctatagctacaaaatgcaccgattgaagcacagatgatgtgtatcatttaaagagtgttgataattttgttttttctctgtcattaktttctatccctataacatattcagtttcttcatctttaaaaagcttttgaagtcaaaattgagtttaaataaccaaatagcatttagacttctcaaattaacacaggcccagaaatctataccattaataaggaaattatgctttgtgattacatcagaattgctgcaaatctagcagtgttttgttaccacagctctaaaatttaactcctttttgaaattagttctgtaagtgaccaaacaaggacatgcagccaataaccctatgaaaaaaaacacttactgttatttaaaataacatttttacattcacaatctattttcacagaatttgatagaactatgcagttatccagatttgccactagagggtagggtagatttggaggctgcttgtgtttttcctcctaatccaggggcatttactctatttaatcaatagatgatgcctgtactcattttacttagcatrtcagcccctttattaaaaattgtgaaaaaaaagactacctaaataagcaaaacccaatcaggaattaaattttagagaagttcccagatggaagataggaaaagctaacattctgctaagtactttatatatggaaaaacaattaatacccacaaaagtactataaaattggtaatattatgccaattttatgttaattatacaaatatatacataatataaatatataatattggcayagtgtgccaattttttattataacatgtaaagtagggagatgtagaatgaattatatgtgcaaaktctcatgaaaaatagtgaattcaggtcttcctgactcaaaaatccaaatctgtccaatataccacattaacagatcaaatcaagccttaatataaataaatctctcacatgatcccctgctaaacagtacatttgttacctttgctatcaatcttacttctttgttttctatagttggagtacgtgtgatgtgtttttatcattgcttctagatttatgaactctgtaaattcgggtaacccatgttgcacctcatgatatgtcctctactgcatggcaaccatccacatgggagctcttctttaattattggagcttattattatgtgcctatataataaatgccttatgagcaaataatttaacaactaattgtttttctctctgttgataatctgttttgttctttactgtgtcagattactttttaaaattatatttaaatagcaaatatacttgagattggcttaatcattacaaaatgtagtcccagatccacggttctagaaaggcagagcaagatggaaagccagagcaaatagatgcctctactgattgtcaaagcaaaagaacaaatagaagcccccaccagtcatcctccccacaagaacaccaaatttgacaactatctacataaaaaagcgccttcatcaggagcaaaaatcagcttaggtgccaacttgaccaccgtggggtagagtaccaaacaggcacttgagtccccaattccaggccttgggtcttggatggcatttctggatctgggttggaccagaggagagcccactctcctgaaaggtgagtcccagggctggaagcattcaccacaagcygactgaagagccactgggcctcgagtgagtttggcggtagcctggcaatactcaccacaggcctggggtggtggtggccatggggagagactcctctgtttatggaagggtgaagggagagtgggaaggattttgacttgtggtttgggtgccagctcagctgcagtagaataaggcaccaggcrgattcctaagatatccaactccaggctctgactcctggatgacatcgctggacccgcttggggctgagggtaactcaccaccttgaaaggaaggacacaaggctggctggcttcatcatctgctaatcgtagagccctagggccatgaataaacataggcggcagccaggtartggttacagcaggccttgggcgagactcagtgctgtgctggcttcaggtctgacccagcacagtcccagtggcagtggctacagggtagtgcttgtattacccacccctcaacttcaggaagctcagcacagagacagaccctccatttgtttaggggaaagtaagggaaaagaacaagatactctgcctggtaatccagagaattcttctggatcttatccaaaaccaccaagrtggtacctctataagtctgcaagagctacagtgttactgggctaagggtgcctcctaacgcagatatggctgcagtgaccaagaacttagatcacagcactcaagtccctttgaatacctagaaagccttccaataagggtgggtacaaacaagcccagactgtgaagactacaacaaatacataactcttaaatgcccagacactgacaaacrtctgcaaacatcaagaccgtctaggaaaatatgacctcaccaagtaaactaaataagccaccagggaccaaccccagagagacagagaaatgtgacctttcagatataaacttcagaatagctgttttgaggaaactcacagaaattcaagacaacacagagaaggaattcaggactctatcagataaatttaacaaagagattgaaataattacaaagaatcaagcagaaattctggaattgaaaaatgcaatcgacatactgaagaatgcatgagagtctcttagcagaattgaacaagcagtagaaagaattagtaagcttgaagacaggctatttgaaaatgcagccagagggtggagcatggtggctcacgcctgtaatccaagcactttgcctgactaacatggtgaaaccccatctctactaaaagaaatacaaaaaaattagccaagcgtagtggcgggtgcctgtaatcccagctactcaggaggctgaggcaggagaatcgcttgaacctgggaggcggaggttgcaatgagctgagatcatgccactgcactccaacctgggcgacagagcaagactccgtctcaaaaaaaaaaaaaaaagaaagaaagaaagaaaatacagtcagagwaaaaagaatgaaaaagaacaaagcacaaaagcacacctacaaaatctagaaaatagcttcaaagcgcaaatataagagtcactggccgtaaaaaggaggtagagagagagataggggtagaaagtttattcaaagggatataagagaacttcccaaagctagagacagttatcaatgttcatgtacaagaagcctatagaataccaagcagacttatcccaaagaagacttaataatcaaactcccaaaggtytaggataaagaaaggatcctaaaagcagtaaragagggagggagagagggagagagaaagagagagagagagagaacattcaagggagctccagtatgtctggcagaagacttttcagtggaaacctttcaggtcgggagaaagtggcatgacatatttaaagcgctgaaggaaaaaaaaaaaaaaaacaccttttaccctagaatagtatatctggtgaaaatatccttcaaacatgtaggagaaataaagactttcccagacaaacaaaagctgaggcatttcattaacagcagacctgtcctataagaaatgctaaagagagttcttcaatttgaaagaaaaggacattaatgagcaataagaaatctgaaggtacaaaactcactggtaatagtaagtacacagaaaaacagaatattataatactgtaattgtggtgtgtaaactgttcacaagtagaaaggctaaaagaaccaatcaaaaataataacgacaagtaattttcaagaaatatacagtacaataagatataaatagaaacaactaaaagtttaaaagcgggatgaagttaaagtgtagaatttttgttagttttctctttgcttgtttatgcaatcagtgttaagttgtcatcagttgaaaataatgggttatattatttgcaagcgtcgtagaaacctcaaataaaaaaacatacaacagttccacaaacaataaaaaagcaatacattggctgggtgtgatggctcaataatcccagcactttaggaggctgaggcaggaggattacttgaggtcagaagttcaagatcagcctggccaaaatggtgaaacctatctctactaaaaatacaaaaattagccaggtgtggtgatgagtgcctgtaatcccagctacttgggaggctgaggcaggagaatcgattgaacctgggaggtggaggttgcaggttgcagtgagtygagatggtgccactgcaccactcaagcctgggtgacagattgagactccatctcaaaaaaaaaagcaatagattaatacatatcaccagagaaaatcattaaaaggaagacaggaaggaaggaaacaaggaagagaagaccacaaaacaatcagaaaacaactaacaaaatagcaggagtaagtcttcacttatcaataataacattgaatgtaaatggactagactctccaatcaaaaacagagagtagctaatcttgtcatttgcaacaacctggatggaattggatgtcatgtcataagtgaaataagccagacacagaaagataaacttctcatgttctcacttgtttgtgggagctaaaaattaaaacaactgaattcatggagatagagactagaatgttggttaccagagtctgggaagggttttttttgtgttgcgggggaggggagtgaagtggagatgcttactgggcacaaatatagaataaataagatagagtatttgatagcacaatagaattactagtcaatgataatttaatgtacatttaaaaataactaaaagtgtatagttgaattgcttgtaacacaaaggatcaatgcttgaggggatagatacctcatttaccctgatatgattattactcatttatgcctgcatcaaaatatctcatgtactccatatatacacctactatgtacccacaaaattaaaaataaaaaagtattcccaaacttaatacaaaacttttagttctctgagtttgatttacttcatcttcattgttatttcttttgtaactttatattataaagattttcaaacacacaagaattaagaaaatagtataacccgaagcgcccattttctagcctcaataattattagcatatggtcaatttcattttatctataccctaacacagctggcaataaaatattttaaagaaaacttccagacacatatcatttcctttgaaaatattttataaggtaattttaaaacataggagattttaaaaataatcacaatacacaaacatcatgcctaaaaaccaagcagatcaaaaatcttttaataatataaaatatgcaggcaatcrttcaaatttccatgattatctcataaatgtgtgttttttaaaaaacaaatttgtccaaatcaggatataaatagtgccaggcatcatatttgatttataggtatcacaagaytcactctatactagctctttcctcctgttttatttttaaccatttatttattgatgctattcctcagtcctgataatatgatccatctttgagaatactttacacaaatttgtttttgccaagggcaattcttttgctttaagactatcasttctaatttatatttccattttagcttttaacattcaactttttttcccaaaagggcctctttaaattcagtctatacaaatacttacatccccaataaaattttactccctctttccatcatctcctcccatataacatcaaaagtataaggctcccatcttcaactttatatatgagagctggaatgtctaagccttagtgttgtcgtgccatctctactcgtcaaatccaaaacagtctctcacacttgcagtttttgatttaaccaagagagggcttaattcctaaattaatatcaagtttatttctgagtttctcttaaatggtctttttcagtcatgatatgataggttatatgattataaatatccttatatttttaagaagttgttatcatttcctggatttccactctcctatcaaaatatcaaagtatgccttcaagaataattagtatgtgatggggaggtttttcttgctcgacttgtttgcttcctcgttaacaactaaaagctctttctgaaatctctattatatcctgtgaatgagcagtatggtggaatcagaaaaacatttgggtccagaggagctctgatcacaaaggacagagtaaggcagttgcttgagaaccaccagcacaaagtcattcttatttgttcctaagatgttaaagttaatctctttattcaaaagaatgtcttggaayctcactgcaaatggctcaaaatataactttccctgtattagaaacccaaagtcaatacacagcacagttagggaatttatttagtctgattactgagcaattaattcaggtaattgcactgtcagtctgaagtaattgagatgaaaaaaaattgaaaatcctattagcacagcaaagatttgaaatcataaaagaatcctgatcattaaaatattttaaaatacttgttgatcttaaagtcttagtttatatagaagatataaatataggctgaataaaagacacctcccaccccccaccacttattccttatctttttttctcctgtattccaaggcagagtagtggaacacaggctttaaatagagctcagtctgaatccagtttgcaatttataactaatggtgtcaattttgaaaatcatctcaaatttgaaaatgttttatatttattcmttcctgctagatgcaacacatttgctctaagaccacaaaaacctatcaaatttattttccaatttaacatttatctttaacattagtcttttctcttctgctgatgtatactctttattatataatatgcgatatattatattttgctattttttaattggttgtgacctttctttttcacttttgtagatctgtggtcaattcttgctctatgacacacttttaaaatgtttagctttaaaattcattttaaaactttattgccacaaggtacagtggctcaagcctcttatcccagcactttgggaggctaaagcaggaggagcacttgaggtcaggatttgaggccagtctgggtaacatggtaagaccctgtctctaccttaaaaaatataaatatatatattatataytattatatatacaatatattatatatatataatttatttagtcagattactgagcaattaattcaggtaattgcactgtcagtctgaagtaattgagatgaaaaaaaccaaaaatcctattaacacagcaaagatttgaaatcataaaagaatcctgatcattaaaatattttaaaatacatatttaatattaatatttaaaatatataatatatatagggtaagtagataatagataaggtaagtagatagataaatacacttactatatatatacacacacacatatatattttatatctatctacttaccatatatacataaatatatatataaaatattatatatattttatatatattatatattgtatatatatatgtaatatatatatacatatatatttattacatatacatatatatttatgtatatatatatatacataaatatatatataaaaaatagttgggtaagcatgtgtgtgtatgtgtatgtgtgtgtgtatacatatatatatagtaagtgtatttatctatctacttaccctatctatttatctacttaccctatatatatagtaagtatatatatttaccatatatatatatatgtatggtaagtagatatatatatatccacttactacagatttatatatatagggtaaatatatatacttactatatatatatayggtatatatatctgtatatctctatatatctactatatatatctataatatatataggatatatatatagagaatatatatatagggtaagtaaattgatagttgggtgtgtatatatatagtaaatttgtgtgtgtctgtgtgtgtgtgtgtgtgtgtgtgtgtacttggttaagtcctatcttgttattctgctttaaatcaatattcttaaatatttttgccgttttcttctcaakaaaattatgttttcaacaagtttgaaaaaaattcaccagaattttaattgaaattgcattaagcctttttaataatttaagagttgaacaattttcaaagctcatactccttcaaaacattgaatggcttactttttttttaatctatgtccctcagtaaaactgtgctgttttctacatataggtcaccctcattttttattcaaggtatttctagagattttgtaatatcgttgctaacataaagtacattttttagcatatatcctagctagttattgcttgtttataactgtgactatcaacagaggagtttcataattatcagtgggtttattcaaactgtattcatatcaccctcagagattctgatacatcttctagaagagagcctgtattagttctcacactgctataaagaatatccgagactgggtaatttgtgaggaaaaggtttaatgggctcacagttccacatggctggggaggcctcaggaaacttagagtcatggcaggtgaaagggaagcaaggcatatcttcacacggcagcaggagagagacagagagcaaagggagaagtgctacacactttcaaacaaccagatctcatgagaactcactgactatcatgagaacagcaaggggaaagtctgcccccatgattcaataacctcccaccaggttggtctctcctccaacacatgggcttacaattcgacatgaggtttgggtggggacacagaaccaaaccatatcagagctgtacccacccttactgataatatgtcaccctcaggattggagagaaaagcaatgttaagttgcactgaagcaaaacaaggctattgggttaaatttttttcatagaatcattttaatatttttattacctctaggagtttytttaaaaatacagaacaatttgttttctaaaacaaaactcaagcatttccttgaaaasgaaaaaaaatcacctctattaatcaattagcactcaatctactatgtgcaaaaaaccgtgccaaaagcttttggaatacgcaatcctatagatctgaactttgcctttggtcagtcaggtttgggtaggaagtggcacttgagagtgggttaattgagctaagctgaaaatagagcacaacatacataagaatgtgtatttttattaaccttatcaacagtctgtccttctgaatacaggcaacatataagtgaaaatacgattgccgaagtagcgtgttggggcaggaataaacctaaattctaaaaatttcagccaaactttagcttttctgcataagtgtacctttttctgttctcacaaatcaggtgcgtgtgggaaccttatgttggccaaggatgtacaaatgaatcatggtcttaagggtggaagacactggaaagagaggttttactatctgatgtactccttggagacagtgtcaatagccctctactcattttcataaagtcagccatgcctgcacttaataatgggttgtctataaatgtgttaacttctaaawtgctactctgaaacttgcaacacattttgctatgaaaatggtgctgtaggtcagagcttttcagactttaccatgcccagaaatctcctggagatcttggtgaaacacagagacccaagtccagagaccctgattcagtgtatttgtagtgcaacccaaggaaatcgcattttaacaagctcctgctgctgctggtgctatgtccacagaccacaatttgagtagcactgctctatacaatggctgaatttctacatyakctcacctaagtctatttaaatcatcatatactactatgtcatattaatggaatctaaatctgcactagaactacaacagaaaactccaggaacatatatcctttccaactgcagtctcagttataatccccaatgaaaacacacactcctacaccatcacgtgaagcatttcctccacttcacaaggcttcaatcaactatcaaaagaggcagcaaagaccctgatagtgacggctactgggcmcgagtaggaaaaaaggattttggcaacaggagaagtttaagaaatatgtattaggtggaggaggtgtcagcagctgccttactgaaggattaggcaggagaggaaagactcttggattagggcttcttttggtgactatcaggttccatgggactctaacggtgagagaatgtggccaccaatcacaatgaaccctcagacaagtgaagtggacctagaaggaaggagaaatataggatttcatgatattggctttccagagtaccgctctcccatttcttgtcaactcagcgtgtcatcttttcctaccatagttaaatatgtaacctagatcttgcctaaagaggaaagggractgatatttatttaatatctactaaacatcatgcactgtgttaagcacattgtatgcatcatcgcattcacattttgtctacattttacaaatgaaaacctacygtggaaagagcaagagcagtttcctccctgacctggatgagtgactttaaataaagtgcttaatctctccaagcacgggttcttcatttataagtgagggcaactattcatactttgtaggcttgtactaaggactaaaacatataggtcaaatccttagctcagtgcctggcccatagttgatgttcaataaatggtagctacatcactacaattaccataattgtttttatttcaaaaattgccagagaagcttccaaaagctcaactactttgtaagcaactgagtcaaaattcaaatctaggtgctttttcccaaacttcaactcaagaataatctgcgtatttgagtgtgtatgtgttcacagttatatatatatgtgtgtacctatacaaatgcaatgttctttatgacttttggttaaagaacacagtaatgtagtaaaattaatactgggcaggaaatcagttctaaccttagttctgctacaaaccttcagtcaatcttaatttcttaaagtgcaagcttcctttaaataaagcaatatgaatacataatctctaaggaccccaggagctctaaaattccataattctatgaggaaatttcatggagcaactgaagagatacagacaaagaggggaataagtgaaaatttaatataattatcaactgaattcattgcttttgaagtgttcttatgacacttatggaattgtaaaactattgaaagttttatatagtttaatctattaatgatttattgtcatgaattctgccttaggtatcatatttagaaagccttttctcattctaatataaaaatatgtacctacattttctttgggttttgatattgttctgtttgatatttaaatccttaatttacttgtaaattctttggtatttcaaatggggtatttagctttattttgtttcaaatatttagtcaattttctaatgttatccaaaaaataattcatcctttacccacaaatcyttcatttaaaaaaaatttttttaagagacaggatcttggagcttctatatagctgaatatctggacgttcctagagactggggcacaagggagggcttggaaactctgtaccccttctccctgcatacctttttatcttcatgtgatgtgccaggcatgggacacagtgattgaaaagttgacatagagcttatattcaaataagggagagagaccatgaataagtaaactgatgatgtctgaaatgaaaatcctatgaatagctgaccagaactcttactggtcagctggtcagggcccaaaagaaataggctttctcatccaccatgcaggcccatgtggacatggtagtgcaaaagagaaataaggggctggagtcccttggcaaagcagataaatacctgcaaactaccttttcaaaatggaagccagactgtgacggtgccttttttgaatgtggaaaagcagggcttccaagcaagctggcatgatgttgaaggagatgcagaaacaaccagtctgcgtgatgtatcgagaaaacagcacccctgacccagcaacctcagaagtggtggagcaagctggaaagctcatagaaaatgtagatccagaaaaggctgtacwattgtatcaataaacagcaatgtgtttgaaaatgtgcaatgcctcaacaggcagttgaacacttaggaaaagcttcaggactgctagtgtaargatgcaggattgatgrgggagcactttctattcagaaagaaaaatatttttaaggaaatggagaattattcaactggttataagaaaagagtcgctcaagtcttatttcacttacacagtaatgactatgcagctgggacagtggtggcaggagagctccggcatagcaggagtccatggaggtgatggctgagctgtactggatcagctcccagaagggtttgcccagcaagaccaagctgcatttcagaggtctgcaactctccacttttcaagcatattggcaatgattatgctagccccagcctgagtttaggggttccagaatgggacatcaataaatcatcaggaatggtttgcacagccacatgaatgtacttaatgacacattaagtgtacacttaaagggggttaaaatgatttattttatgttgtgtgtattttaccatagtaaaaaaaattaagaagaaggaataagaggaagaagaggagttggagagaagaagaagaggaggaggaaaaagaagagttagaagaaaaaagaggagaaacagaaggaaaagaggaggaggaaaatgggggaaaattagcaacaccagtcatggctggtggcatcacctccatggctgctgttaaggaagacaaatattcaggactatgctagtattttgctttgcaaataaataaataatacatagataacagaaaaagtatcacatggcgtttcagggacttggaatttgtttaagagtattccatacttcattgtagccacggtttgaatgctaatactctaatttttagttattaattccccaaattaaaaaaaaagccagagacagacctcactctattacttatcctgtaatgcagtggcaccatcatagttcactatagcctccaactcctgggtttatgcaatcctcccactttagcctcttgaatagctgaggttacagacatgcaccaccatgccatgcaccaccactccaagcctagataactttctttttttgtatcttttttttttttggtagaaatggaggtcttgctatattgcccaggctaatcttgaacacgtggactcaagcagttctcccattttggccttccaaagtgctgggactataggcatgagccaccacacccggcctacccacaaatcttaaccaacctttattgtgttctaaagtcttggcattaaaacgcattttatattggaagatttcattatattattctacctttgcacagctagaatgagccctacttggtggattatatttgctaatacttagcaataatgcatcacaatttataagtaagcatggtctgtagttgtttctaaccttctaaattttttaatatcaggattattctagcctgtcaggtgcattagaaaatttcatttttaaatccccctgtaatagattagatagcataagaattgtctattccttgatgacttgatagaactataatctataacccctttaagcatgaatttttcatgaagagatgttttattgtcttttaaactcaatgatttcttcaggttttttttatgacctctggagttaatgttgatcatttattatttcccaataaagccttccatttcatccagagcgtttgtaaagctgatatgcattaagaatctctaagagcacaaagtagtttttttaaacttttttgttcaagaatatgttgcygtttaattcattcttttgtacaaatatttttctaagttaggcactttgaaaaatgctaacacactgtcttaaagcattctcttaaatttgttttcaaattatctctgcacaaagaattaaattccttttcttagtctgaatcttgtatattactttttctgttataattgttagtatttatccaaagaattatctcttgaacatatgtattaattcttctattttcctagatattttttcttttaaaatatgaattcttaaagacaggcattatagacaaccagtctgtggagaaaatattttgagaggaggaggaattttattttgcctccttccattttataggaggaacagatttataccctgtttacacatgtagcttattggataataacatgaacgaataatatygacttagaaactttatttggactaagttataaattgtatttcttattatacaataatgggaatataatttctacattccaaaacatgtacaggtagccatttggactatgagacctacaacaaaatatcaagtatctacatagtacggcaaccaggcatttggtgctctatgaattaaaggtctcaatgaagggctatacattatattatttagacttcatctgcaggttctctaagcatgttataatttctatgaatttcagtttccatacctgtaaaatggagattatacacctactgtgcaaagtttgggtaacaattagagttaacagataacctgtctcaagacccttttcccagtagctgtggcctcttaaagcccctacaaaatttgaagaagagatctttgggccttgcaaaatcctaggtaatttcactttatcaaaagccaaagcatgtgagtgttttaactcatctgaatcataaaataaatcattacgaagagttaacagtccttggattagaataaactacctttcattgatttcaaagtgcatttttgttttacatttttgtatctctactcagaatgctccttaaaattgatgatgtcttaaaaatataactgacattgcttttcttgtctaggagtatgtaatacaatggtacattttacaaatgaggacatcttagggtaaaaacatactgtaataccttcctcagttgttttccaatttaccacccccttcctaggaaaatccacacgccttaatgaattgctayagtcattagcaaagggagtaagttttgatgtttgtcttgtctgtgggccttgtttccctctgactcataagctctaatatactccagccattcaaaataccaggtccacatacataggtgcacttacaaaaggtcctcattgcacaccattgaagaatcacataccctaaattcgagattttaaacctcagatacagatagcctaggtccctaccaacagtctcacaaaaaatgcaaacctcaggggatggtactccaaagtaattaaccaaaacaagagtagttgttatgcaaataccaaggaatttaatctccttaagaaaacaataaattcctggttcagacctaaaggcacaaattttaaaatgtgtgtagattacagactcagctcagctccattctaaaagatgcattctctataagacctccctaacacctggaatasaagcagctgggtaaacatcctggccatgcagtatgggcagcatgagtcagttagagggcaaggttctttctcttgatccgcccacataccttgggggtgttagaagccttgatggaagtaggagatgaagtgtttcatggaaaaacacctacttccgcatgataaggcaaggagagggagtgaaagagaagatgggccctacccttctgcagggccctaaagccactaccaagacaggagaagggaaagcccctttattttgtgtcctgggattggagaaataattttttaaagaccctaaaatcataaatattactatacaagtatgtgtgtaaacagagatggatttctgttcaatgaattaaatcataaatgaaaagagaaatggctaggcatggtggctcatgcctgtaatcccagaactttgggaggccaaggcaggtggatcacttgaggttaggagtttgagaccagcctggccaacatagtgaaaccctgtctctaccaaacagaaaaattagccgggcatggtggtgcacacctgtagtcccagctacttgggaggctgaggcagaagagtcacttgagtcccggaggcagaggttgcagtgagctgagatcgcaccactgcactccagcctgggccacagagcaaaactacgttaaaaaaaaaaaaaaaaaaaaaaaaaaaaaaccgaaaaagaaaagagaaatgacagattgacagaaatagactagcaaactgagtgggaaatgaatactcagcactgttgatggaagtgcatagcctatttctggaataatcyggaaatatatagtaaaattgatcaaccatatgacctatgaccaaaaaattctcattcctagatgtatggcatgcacactattccatcgtggggcatataaatgctgacatatttaatggtgcagaatttaagggaatgaaattatcggtcattggggaataggacagtttaaaggtggaggttttacagtaagaagyaacaaacaacatatgcttaatgcaacatgttggattctcacaagccaggcctgctttatagatgtgtgaaatatgcaactctagaggattagaaggtgtggttagaaggccctcacacttagacactttgttgtcatcatctttaaattattattcataagaagtcccatatttaaaatttggcactgggccccacaaattatggagacaatccagttcacaggcataatgtacagtaagaaaagtaggaaacaatgagatttataataaaataatatatgaaaatctcatatatgctatatactttacagtgatatggtcactctttaggataaactagagattgaatgaaagtagggatcagggacaaaggtcaaaataaattaaataaaatttataaaagaataaacaaagcagtaaagggtccttatatggatgaataacccattcagtgtaaaagtgccccaaactacaatgatttggatttcctgtgggtaggaatgcattgcagaaaatgtttggcaaaatagttcaagatcaactatgtaataattgaaaaktccatcgtttcttttcttttttccccaagaatatctgtgttttctagtatagaaatgtttgtatttgctagcatagactagattccagcagtttgtatattgccaaaacatgaactatctttccagttgctatgttttatttcagagactcaaattggcatgccagtagaatgtactacattttaagtggaattatacattaaaaatataagaatataaaacgtttctcataaatcaagtaaatctgtaaataattaagtggttgaaactattatagtaatggaagcaaagccaattccaactacaatttccaatcaaactgactctaatggaacctaattagtaactgacacaatccaaagaaacttraaggtatttaaactaacctcatgccactaagtcctacctgactaaaatgcacgttctgatacaagtgtgtttgcaattctttcctatgctctgcgtgtatatagacatgtctgaaccaatgatgaaaattcaggaaataattcaggaatactcttcctcttcagattactttgaagcatggaaaatattagttttgagatcattttagaaatttggttgttttaatttacccaaactggacttgtaattacccttgtaattttcgataatataaatgcccactactgaaaatagagctctatgcagttctggaattccagattatctgatttcaaactttcatggagtgcagacacaagacagcttacatggcaagaaagagattggttggagagtagaaaaaaaaagccagttttgtttttgtttatttgcctttagctagctagagatcttgaaagaattggatatactatttcctaccaattctaatgcccaatttacataccaaggtaaaagaaattcagaaaagccaaagcaataattgrcaatgtggtagcattagaagtgatgcagctggatgaggcaggaggatgtggcattttacagagatgctcgtatgactggggtcatttcatccacccttggtggaaattattttctaagtagagagtctcagattctgctgagaatcttccaattcatctgacccttgaggcatggaacatgaggattggcttggcaggagtgagaattttagtctcaatcacattctttttcatcactggctaagaactcacctaacaagtttaccttagtagcatctgttatatttgaaaccatgattaatctgcttccagttgagaaatttctagttgcgccatcttttgagctgtttaaaacagagcatgttccactgacagttgcctctggaaggatctggaatgcacctgaagctcccaggacttgaagacagacctccaaagacttggatcaggtaatgacttttcatctatttgcagagcctggatcatagtgtattagtgagacataggaaaccttcagagggacagaactttacatgttgatgatgaatattgtattttgattctatcaggttaagcaagatacagcaagagtataatgtgacaacttcagatggagagtcttctaggtatgttatgacaagttttccctttcagaaagctgcagcatctagaaagcagacatcactatatttgaacctcagtgagaggaggtatcacaagtctacacttggaaaaatctagcaataaataattttatgaacctctcttttgagtcttgcatctaggggtttgggaaataatgtttggataatgttctcaaaaccatttaccattttttaggaagccctttatgttctcattccaatggccttgagtatgaatattcttttttatgatcagggtcatctgcagggkaatatgaagcaaagtgactgtcaagagtgacacaactgcttatgaaatcaatcatttgtggaggacacaccattctctttttctgctgctttgtaataaatagtttgactgggagaggagtgaaaatgtggttcacattaatgtagatgatatttaagagtatcatgctcctgtcaccctttaaattgcagacctgattggaagctagaaagatgaagatgagtcaactggatggactaatattccctctagacatagagagattaaataattattctttaattctatgtgtcaaagccaaactgttattttttgtttgtttttacaaaatagttatcctttgttttctttttctagaaataagaaagcagtttttaccaggctttcttygtgtctgaaaacagaaaccaactcaaatatatagcaccttggcatacttagcacttcaggctgtaaatatgagagtatggaactgagttttggaataacaatatgaagttaaagtgccattttactctaaaatkacttggtttcatattccttcactggactatcctgtctctcccttactttgtaaggacattgagggaaaaattatttccttcactgctcttcctttgtggtttattttatttaatttttgcctttaatttgaaggaacaatctttcagaccctattttaccaggcaggacaagtgttttgtccttcatattatcgaagacatgtgaaatataatgctctttaaatgtttgttattcatttttttctgccttggcattttatttcccatttatcccaagactcttgttcttttctgcttgcctctaggcttagagcacagagctactggcctcttaacctatttgaaaattccatcaaagttgcctagtctttcttcctgattcaaatgtgctaggtgtttaattctcaaatctacaatttttaggactggatatcctattaggtaaagatttcctttcattcacttgttaatagtctcctcagtcttcctgattcattgtctttcaccctgtgggtgggggaaaaacagggaagcaatttaaatctagtttctgactaacctgaccactaatagttgtgagtcactctgttttggtaagaggttaaaagtattagagctttatgaaggatgctgaggtaggagcaagacagatcctaaatctctgtaaacacccagtgggtttttagatttaaaatgtcagataaaaaggaaaaatgtggcagatgcaaaaacattctaattgataaacaacagtcttctggcaaacccagtcatttgtatggctgccaagaatcttttaataaacaaaaactatgcgatactgctgaaatgattattacaagatggaagtactaaaacttctgaactttgcccctaagaagacatctaggacatttactcacaggtcattgagtttaaatttatacataattatttctaaatgtcataacctttgctattattataaggatgattcaagctaataaattcatcaagaaaaatatataaccaataagtaaattagtggaagagrgaaaatgtttattcccwgtgaccaaatataaccattttcattttggagtaattcttctagtcttttgaagaccatacttttttgtttatttgttttagaagtttaaaaacaataaaaatttaaaaatatataacagttgcttaaatattatttttgcttctatagtcccaaagtttgcaaaactctgtaagtgactgcaaatttttaggttggcatataaaatttatgtcatatttttaaatcattgctaaggtgcactttatggcacattgtaaatattaatagtttaaaattaaattgctacacaattttcaaaatgaatccaatagaataatgatttgatgcctaatatcatccatttaaaaattcccttaatgaatttaaagttttacatcttttatttttctctttctattcatattctcattccagtcatttctacagatgttttacatattcctacaaatatattttaatataacatatttgtgttattatttcttttattgatcagtagattattctctgcaactaaaaggtccatatacattaaaacttaaattgttttcatttcctgtgaccataaggttgcattttgtaaaaagtttttaatgatgtgtgattttaatttttctttgtatataattgtccaaaggatcataacacattaaaagtttaatgaaaaatgattaagcattaggagtaaaactttattggtgatgcttttcttaatgacgtaaatagatctttgccttttaaattctgcatccattgatgatgattatttattgacagaatgaaacaaaattcatcatcaattctttttcattttttgaatagatgtgagtgctgagaaaccatgtttacataatgccacaattttttgaactctttatgaagctctgtgtcacaaatcacatagtgatgcatcaacaaaaattattttatttttttattatactttaagttctgggatacatgtgcagaatgtgtaggtttgttacataggtatacatgtgccacggtggtttgctgcacctatcaacccgtcatctacattaggtatttctcctaatgctatccttctccttgtcccccaccccccgacaggccccagtgtgtgatgttcccctccctgtgttctcattgttcaactctcacctatgagtgagaacatgcggtgtttggatttttgttcctgttagctggctgagaatgatggcttccagccaagacacaaaaattattttttatgatctatctactaaccactcaagtgcatcctctttctatttttttttttttaagcaaagaattcgaaaccgacttgcagaagttaaatgcccttggaaagggactgctattttattaaggtcagttcctttcccaataccaatgtcaatattgtcaattattctcttgttagggagtctcagccatttatacagcctagaacaattcacatcgtaagattcaggaaaggagagggttgggcttttcctttgcaaagttagaaaaggagaccctgcttcaaaccagaaattctcaggccaaattagtattacaaaagagtgtagatgagagtcaaaggtctagaatttcattcttttaaaactaggtatgtgcctatgtatttcttgaaagttattgtatactctatagactattggtatatacaattcttttgcccaacaactttttcctctatttaacataatgttataagtatgctttcatgtttttatatagtctttaaaataattkaatggacttatctacaagattaaattaatatattatagtttattttaaaattctcttgtaattgaaaacatgtttttaatttttattacaaataacaagaattaaagcaatcttgtacaaaaagatccctctccaagttgagaatttatctttttagcatgtatttattgagtggaactactgggatataaaatgtggatgttctttaaaattcctagtaattacagcaatatgtcaaataagttttactagtttacaccagcactagtaaatgttgaaaacacctgctttgcaacagtttccagtttccttttaattgtggtataattacattcagtaaaatgcacagatctgaattgtacagtttgatgaatcttagcaattaccccagtcaaaatttgccctagaaccaagcaaacactrttgtgatttctattcctatgaattagttttatctgtttttgacctttacagaaattcaaccgcagagtatgcactcctttgygcttttttcattcggcataacgtttgtgatatttatccaggctgttgaatgtgtcgatgagtagtaagcattccattacataaatataacatgattatgtgtccattctactactaatggacatttgtattattttcaataatttgctatttgtgaataaatcttcagcgaacaatcttgcaaaccaatattttcttttattttaagcaactacctaaaggcagaattgctatctcacaggattttcagaaactgttagagtttctgagagtcactgtgatattataaactataaatatatatcccatcatcaatatatggaaaggtccagtagctcctcatcttccccaacatttggtgcagttgatgttagctagtctagtgagtatgcagtagtatctctctagggtttaactttgcatttctttctgatgactaacaatgttgaacatcttttcttgtgtttattgaccttccatctattctcttttgtttactgtctgtccaagtattttgtccattttttaaatttaatttttttgttgttatttatttctggagttcttgaaatttcctagagtcctttatcaaatatctgttgcaaatattttccttttgtctgtgaattgtctttttattttattattgcatatattttaatgtgaataacgtgatgttttgctatatatatatgtagtgaaatggttactatagtcaaacaaattaacgtatcaataatcttacctagttaccctttgtgtgcgtggcaagagcgcttaaaatgtactcttttagccaaaattccaagtacaatacaataaactatagccctcaagttgtacattagctgttttgtttcttctcttttcctttgctttttgagacagtctcaytctatcacccaggctggagtgcagtggcacaatctcggctcactgcaacctccacctcctgggttcaagtgattatcatatctcagcctcctatgagtagctgggattacaagcatgcaccaacatgcctggttaatttttgaatttttagtagagatggggttttaccatgttggccaggtgggtcttgagctcctggcctcaagtgatccacctgccttggcttcccaaagtactgggattacaagcgtgagccactgtgtccggcctatttttttgatgatgtttttgaagaacagaagttttttattttaataattttttaatcttttttttgyttatggttagttgtctaccmcaaayktgtaaagatattattctttgttatcttctaacaactttgtacttaagcttttagttttagatttgcaatctgaggtatatttttgtatctggtttgggaaatgtatcaaggttacttttttcaaaattgatttccaattgttcctgcaggaataattgttgaaaatactttctcattgaaatacattgaaacctatgtcaaaagttattaaacaacatataatttaatctgttgagtctgttgatgtataaacaaagtatatctctctatgtatttggatttgttttgtaattttcagtgtaaagattttacagatcttctgctcaatgtatttctcattattttgatttttgttagcatagcaagtgtagtgcaatgatgactctgaactctctcagttgaaatcatattttaccactttttaatagataaaattttacaatgtttcagtaatttttttagctaaaaagaactaaaactagctatgacagcaacaataaaaatgactggtaacaatgcaagtaagcttcatttacctacttactattcatgcacttattcagcaaatccatactgtggacctaccataatgtggacctaacatttacctgttaatggcctaaattctcatacatgctgaacagataaggtgtctattgtaaatatagtactgctccctcccatattctttgtgaaagtcatatccttgttccagataatgtttttttttmttaattccaggctccatactctgaatcatctgagccacttctcattaacacatacatcagcttagcctaattatagcttttgcagggatttatctgagctgatgtatctgtactgtttccatttacttttctgcttattttcttcagagaacwgtcctatttaaaatgaaaatgctagtgtgattcttactgttaccatgggaagaagagagagaaagagaaagctttgaaatagtgcattgcaatagtccataatttctttctcttgaataaagagttttattttgtttttaaccagagggtcagatataaggaaactgaaagaaaagatgaccaacttcttttgaataagattttcagcctgtaactctatattagctataggttactggaatttcatgaaatgtatgcatcctggtagtcatttaaagaaatgaaatacatgggatactccatcatcacacaggagacacagtatagagaggtggttacatctgtagactctgggatcaaaccaatcagatacaaatatcgctatagcaatttctagctatgtgaatttagctaacctacttaccctctctttgcatgagttccactttctgtacaacaaaccaacaaaaagaggataatagagataataatagtagcacctaccaatagagttgtttgtaacttaattcttataaatcactttttaaagtyaacgccatatagttatttccaattgttattatatgtgatagataccaaaaattatagctgttattgtcctaattgcattttgattttttgttgtaagtattaccataacagtgtttttatttctggcgactagaaaaaaagagggataaactttcaaagcaagaaaatacgttctgaaagaagcatagttttatgaactatctactttatcagcataagaaaaaacaattgctttttaaatattagctttgtatcttaatacttttctctgtattcatctattagatatagtgggttttgtgtagactagttaggattttctatgtgcatcaccacaccatgtaaaaataaatttaggctgggcgtggtggctcacacctgtaatcccagcactttgggaggccgaggtgggcggattacctgaggtcaggtgtttgaaaccagcctggccaacatggtgaaaccccatctctactaaaaatacaaaaattagccaggcgcagtggtgggcacctgtaatcccagctacttgcagggcagaggcaggagaatcacttgaacccaggagaggctcactgcagaggttgcagtgagccaagaccatgccattgcactccagcctgggtgtcagagcaagactctgtctcaaaaaaataaaaataaaaataaaataaaataaaataaatttagtgttgtttctactttcccatctttgttgttgttgttgttttctctttcgatttattttatttaatagcacctccagtatcacggtaaatggaggtgataagaaagacatgctttctcttgtttcattcttaaggtgaaagtattcaatatgttagcattaattataattgyacctggaggatattttatagaattccttcatctgattgagttccttttcatttctattttcctaaaaattttttattataaagtggtgttgagttttgtcaaaygtacttcccaattttaaaactgatcattttaaactatttgctcctttgattaatttccatattattctaataaccttggctccaatttatccatcagaacactaagaatagtttgtcaagaagggttgtatgctaacaacttcagggacacatgaacaacttcagtgttataactctgtaaaatcgtcgatgagtgtaataatttcttccgcatattagataggatgctcaccaatgaaactatgtggatctgtaatttttgtccatgcacgtggaaatattttataaaacaaattcaacttttaaagtagatatagaaatgttctttttcttctggaaatggttttttaagttgtgtttttcaaggaatttgtctagttaatataatttatcaaatttatttgcagttttcagaatattctcttattttattgtttgtattgttaatgatatgtactattttatttctgatattggcacatattgtagctctatttttccttgattagttttgttagggttacttgatttttattaattttttccaaggaccaacttttggctttattaattttctctaatatgtttatttattttattatttcctctttattattcctctcctcatactactttgatattaatttgattctctttttctaactttttatggtagaaactcagataattgattataaacttttttctaacactggcagttaaatcactaaatttatttctaagcagtactttggctgtatgtcaaattttgatatgtcatgttttattatcatttagttgcaaatatcttctawtttccatttttattgcttcagtttctatgggttctttaggcatgttctgcaaatgtcaattataacaaattggttaatagtgctgttcaggttttctatatttctatattatttctgtctaatttttctgccaattattgaaagagatatgttgaaacatacagctatgaaactgaataattacctgtatctctatcagtttgatcttctcatattctgaagttctattattggatgcctacatatttagggttgttttatcttcctgatgaattgacttttgtcttctagatgaattaacattatgaaatatctcactttgactctgataatgttcattgtcttgaagcctactttgtctgttataaatttgacagctttcttattcttactgcttgtatgatatatttatttcttttactttcaacccattttcctttacatttaaagtgtgcttttgttgaaagtacatagttgggccccgctttttttatacatattatagtctgacaatatttgcctttttttagagtattttctgtattagcatttaatgtaatttttggtacagttttgtttaaatctgccattctgatctttcactatttgttttccacttgtcctctttcttccttttctttcttttttctttctttctgtttctctttctttctttctttcctttctttctctctctctttctttctccttccttccttcctgctttccttccttcctwgcctgttttctgccttattctaggataataaaatattagcattctgtcatgattcctctattgagtttttaaaatatgcctacctcaagattgcaaatttgtaccctattatctgatgactgaaaacaattgacttgtatrtttgatctagtgagagaactagtcttgtatgagttacaccaccatatttggaagtggaagtttttcattatggtttctcaaatggatatttaatatgataaaatgattttgtaaaaattaatcttttggcaacatacataaygattcgactcataaagactcaaaaatgaaaaaccaggcaggagaccagtataatgatataagatattaggaattagatactagactagataggtaatagtaataattgaaaactttttaaaaagaatgacagagaaaagagataattgagcaaagttttgaaaaggagtttgaaaatatttgaaagaatatcactatttattaagagattggcaatagagtttgaggaaatcagagaattcaggaaaatttctttttttttttttttttttttgagacagagtctcattctgtcattcaggtgggagtgcagtggcccgatctcggttcactgcaacctctgcctctcgggttcaagtgattctcctgcctcagcctccgagtagctgggactacaggcrtgtgccaccacaactggctaatttttgtattttcagtagagacagatttcaccatgttagccaggctggtctggaactcctggcctcaggtgatccacacgcctcggcctcccaaagtgctgggattacaggcatgagccactgagcctggccagaatataggaaaatttcagtttccagctttcaagattgggaggatacagattctggaattgaaataaaagaggaattgaaaaagaaaaagagaataattctatttgaggggatactggattaaagactgcaaaaagaaatcaaagtggaagtatcctgaaggcttgagggaatatggaattagaggttcacatgtgggatgtatggatttggatttttttttctcacctagggaatatatgaaagtatgtgattagtgagagatacttgagagaatgagtttggggagaaagaaagagtgagcagcagacagatgataagatgctgttggatcaaggagaatggggaaagagaccagtgcatgtagctagcaaagggtggagctgggagtcagaacaccagagrtgaagaagcggatgggtgactaggagacagcaggagagatcccacatgtttgattccaggatttgtctgttttgtcatccagttcatttaaatagtaaacatagggatgagctctcaaaccatctgctaaatacctggttgtgaataccagattcctttggaatrtctctctgctcccttctagatcttttcattcaaatgattgtaaaggaaaggttcgtcttggtccttaactttgcttgagttattttagaaacatagcagaagatattcaccttctactcttgggtttttctgtaaagaagatgcatcctgccttatattccggtattttctatttttttatgatttagttatgctgtctttagcattatttctttggaactttgcaacaacctcatgaggaaggtggcataggcatttttaaggtccacgtgttttcccagataggaaaagaaaggcccacactataggtcttctgtttttcggactctttttctagaattctttcattaactcccagtaactctcctaattgtgcattgtgatagagaagaggataataaacttttcctcctcagcacacagttgggaaataatgatgtaccatctgatctacagacaaaaataagctgaatgcacaattgccataaaattcctgctaatatctcatctggaaatatatagaaatatattactcaagaccagccattccattgtttaccaacaactgaacatgtaaaaattgctcaaacatagcttattaagatamgaagtgaaaaaacatcactcaggttgcctaaacttgtattatttaatgtttttttttttctgatttatttcttccccactctctttttctttgccttcctggctcctttctttaacttttctcattttctgtctctctcttggggcaggaaagaggctctttcagttttttgtttagccttcttaagatcatataggtaatatcgattcattataaatatggaccttttatccttttgtccaaataatgatctgttatataattgctttcttcctcccatgcattctacattcccacatttcttttccatatctttcttagctcactaatcaagaaaagatgaaacaaaaaatgtatgccataactgatgacaggcaagatatggtttcatgtctttcactaatattatacttggcttccttctatatatatacatacatattatttaggaaattttatatatatagatctatatatatagaaggaagccaagtataatataggatgaaaattttatatatatactttagaaaattatatattatatatataaatttttatcccatttgtcatgtcttccttgggctgtgagaatgtcatacattttgcttacattttattgtgcatgttgacatcagctttgttttgtgtcttttatttgtttaccaggtaacctgcatatacaagaaattttctattttcatttttctgggccctatcctattttttactttgtcactcataagaattttatactcaaatttgttaagacaaaattgttcctctcttgtaatcttccaatgagttacactgttcccaaactatcttcataaggggtagtaagacccagtgaaaagaaattgagtaaaacagatattgttcaaattctaaaytgacatttacgtttgctagcgatggaaaaataatgattataatgattaagcatatagatgctcagtccatggtatataaattatagattaaataggtaaagtactctatacagtgaaaaatgaatattattaatagaattaataagtaaacagaaattcttggctgctcttattctatttgagaagtgttggtacaaaatatgttgttatttttcataagtcaattgaaataattgtgccatattcagtatgagcaaaactagagacacagaagatttaaaaagttataaataygaagtatttgtatttataatataaagtataatatgtggttcttgtccttaagaagcttatgaactagttgaagaaccaagacatacatctgaaataatcacagaagtagaagacatggtataacaagagctaccatttactgagagtcaagcattgttagatgttttatagacattatttatcatcttatttatcacatctttatcatcttaagccaaccctacacgtaggtgttattatcctcaccatacagataagaaaattaagtttcagagaagtttaattgcctagcaatcacacaactaataataaaaacagtaatagtcaatagttaggaagtgtctacaatgtgcggcttcactgggaagctagtgatggagttgagacacaggagctgtggctcatagccagttttgctccctgcagttgaagctctgacagctgcattctcatggctgccatatcttctgaaggacagagttagaattttaactcagaattctccacaaagcattcagggattcatcattagctttattttaccattgatcaaactgaaattcwtctgtagaaactgacccctttgcattttttaaacttaagagttttccaaacttagagcttagagttttctgtggggtctttgtacctgcacactctggccaattctcacctccatttacgaatacagtgaagaattagggtggggactggttaagaatgctctccaagcattgccataagttgttattaagtgtttgcttgatgagcctgatagttcctattatkgggcaatgagaaaaatggaattaaggtctctattacttctgatattcttttgttgagaaattgctatccttgatttcaccatcaatgtatttgtcagtgcaaaatgcattacttatgagagctgcctacatataatccacatgcatttgatatacaatatgtaaacccartataaaatcaaacatgcatcaaggcaatattctcttgaaagtctcatatttcctactgactgcagtagctagaggggttgggggcagggagcggacaaaaagcaactattggagaaagggagattttgagcatgggaagagggtcttgcaagtaatgtacctttttccaaccaaatttgagtaaaagtagcagctgtctccactgtcatgtagagcatctgcctgaagaaacttttgaaagagacatttccaatttttgcccacttattttagcctttccttcattatatagatttttttggtatagtaaatagagaaagaaatattaaatcagcatttaataattcatggacacaaagaggggaacgacagacactggggcctacttgagggtggagggtaggaggaggaagaggatcagaaaaagtaactatttggtactaggtttagtacctgggcaacgaaatactctgtgcaaccaacctccatgacacaagtttacgtatataacaaacctgcacatctacccctgaatccaaaataaaatttttaaaaaagacggcagaaaagtaggttaaataaagttaaatagagtcttgactgcaggactatagtgaaccttaattataaactaaggctctccaaataagtgatgtttatagcatttatataagtgtatccagatacatgtgtgtgtatgtgtgtgtgtagtctgaatatccaagcaagttttatgcacacacacacacacacacacagtctataagtctccaaggaagtcatatatataatatgtacacatacatatatagttgaacatatatttgcccatggcctctttatacaaatagcattttatgggagtcatgttttgtaggatggcaatgtgaaaagctgatttacagtgataaatcaataaaatctattatagattatatctataataaaatatacaataaatataatctattgtgatttaatctgagtacttgcaaccaagggtcacatctttaaaaactgagaatcccctgaatttatcatgtctgcttttttcttagtctaaaatccttatatgcattagcatatccttagtctaatatccttatatttmttagtctaatatctttatatttcttagtctaaggatatatgtctaaggatatatgaaacaggatataaggatatatgatattatatagaatataaggatatatgaaccagcagaatgtcgatgtgggacacatgagaaggcaatattcatcagggagctgtcacagaaacaggtcaaagaaataaaaaaactcagagtattattaagagaggttcctgaatcaagcacccttacccaacaattatagttaatgctataaagcttggataggcaaagcaggtaagaacatcccttgtaagaggtgctggaagacaggctgtttagattggacttgacactccttcctaaatggaacacgtatagactyctcttgctgcggtgtgtcatccttctatatccagatccatataacacaggggaacaaaacaaaggcagctgatgggctgtatgtcatggttacaaaaggcaatctgtcatggctagtatatccttgtgccatcccttggggctggctcccagctcttcctataagcagcacattgtgctagctcacagccctcttcccctgcaacattacaacaccgacaggattagccatttcagaagagagctggatctgctccaacacaaggaccccaggtttacttactggtgattttgattcagaggcctcaaaacgccagccactcagcagaaatgagaccatgttaactgtcaaagccttgagagagaagaccaatttttacacatttccctactactttgccataaaatataatcctgaggtaaggacctgatcaacattcraagcttactctcagtgaggaatgatgaagtggaataaaatcaaaccagtgaagcaatatgtaatataaaatagtgagtcaatttggcatagtcattaagattaaataacatggccaggtgcggtggctcactcctgtaatcccagcactttgggaggccaaggtgggtggatcagcaggagtcaggagttcgagaccagcctgaccaaaatggtgaaaccccgtctctactaaaactacaaaaaattaggtgtggcggcacgcgcctgtaatcccagctattccgggggctggggcaagagaatcccttgaacccagaagacggatgttgcagtgagccggggtcgcaccattatactccagcctgggcaacaagagcaaaactccgtctcaggaaaaaaaagattaaataacatattcatgtactccttcatccatccattttattggcatttataaaaacctgcatgctaggtctcagataaacagaaacaagaatgaagtagtttatcttctgaaagaatccaaccagtctggctgttttttaaactttagaatgcatatgaaccacttgtaatgatggtttaaaatgcagattgctgggccaagccccctcaatagattctccttcagctaggcggtggtgaggtctaagggttttcagtgtgatgtctaagagtcttcagtgtttttcatggtgattatgatgcctgtggtctatgggccatacttagaaaaacactaattagacacacagaagccagagggcccctgtaaaactagtctgaatggacggagtggttaagagcacagtcttcatttgcatttcctagagtcaggcaacctgagttcagattctgcctccatgaccatctgtttgatgttgggcaaattacttgactttgtaagacccagttttattttaaataaaatgaggacaatatttcccatccttttttaaattgtttttcttcttttcttttttyttttttttttttttttttttttgacagggtttcactctgtcaccgaggctggcgttcagtggtggtgctattacagctcactggagtctcaaactcctgggcccaggtgatcctctcacctcagccccatgagtagctgggactacaggtgcatgccaccatggctggctaattttttgtatttgttttagaaacagggttttccgtgttgcccaggctggtctcgtactcctggactgaagtgatcagcccgtctcagccttccaaagtgctgggattacaggcatgagccatcatgcccagcccaatatttcctaccctttagaattattttgagaataaaataaaatcatatatgtccggcacattatttggtacataataggtgctcaatacatagttataagagcagttatgacagcaataataattattgcttctgaaggtgatattattattgctgccatagagttgcaccagaatcaagctatattaayctgtattaatttatatgtcaatatattatattactatacaatagcaaaacagattagcagggagggtgtattttctaacataatttgaagatctgtattttataagtaactgtaaaaggaagccctcytgaaaaatgttccccttggttgtttttgcaaagttgttctttgctttaaacttaagtagtttcaaagacaaatgagaaatactcataatctttttctctccacaatgttcacaattttaaaaaaagtttaaataataatgtttttcctatgataaagtaatactggatatagaaaatttagaaagtgtgaaaaacactttaaaaatgagaaaataatcatccaamtattcaccatctagatataactataattaaaatttgatgtttaggytttttttttctattatggtttgtgtcatcattgaactcaaaatatatgcacaatttgaagtctgtttttccctaygtattatgtagtaggaattttcacatatcacacataagcataatatttgatgactgaataattccattttttctcacccataatttaggtcaacagtctcttacttygggaaattttactgtcttaagayatataataagaaataattttatacccagtgtttatatasacgtcatttttcttttagatagattcctgaaaacaaaattactgagtgaaggttatgaatacttttaaatttacaagacatgttaacaaatttttttcataaaggttttgccaatgattaactctaccatcagaaaaaagtaccaaccaatctartaactagagataccaaatgtgctttgattaatttattggccattatatttcttttcyacacattatctattccctcttttgtccagttatctactggaaacttgattgattggtttctctgttcctttccattcattccctcttttcttctttccttgtgccttttcttttcttactaaaaagtcattttagatttttcatggaatgaatgttgtataattcagtattctactggttaaagcacagcctagaagtatgtttctgctctctctcatagcagtgttataaaaagattacaccaaatttcacttygtagaatttatctttgatgacaaatatattaaatttcctttcctaggcagatcccaaatgtggcagcttttagcagcagcatgctggatgcttcttcttggatctatgtatggttatgacaagaaaggaaacaatgcaaaccctgaagctaatatgaatattgtaagtcatttattmagaaaaaatgctaaaataaggaattattcatatttcagcattttagatacaactggtgtgccttcttagttttcagcaattcctccagtgactaagtctgtgcttcctctcctgtttcttgatatggctaactaatccaagaattaaaagatctgacccaagttggggcagtaatagtccatctcctggtggtttgaactaccatccagtggtggcttcctaaagagaagtttcatgacttaatacagatgatctctatagagtayctttgagwtttccccgagatttttgatagagcagtttctttgattttgtgagctatcccaataygcttttttggtttcataagccagtgttggtttctgttgtttattaccaaagtattttaacattcaggaattcatatcagaagtggaatggaatagtgttaggcaaagaaaaaaaggccaaatgacaaatatctactacagaattcattcagataatatactccattctcctatataaacggcgcacaattgctgtcctgtaccatacgcaagttgtatcagaaccataaaaagaacgaaactgccaaagttttttttcattagtatctcttcttgttcctctctccaaagtatccagcaagtacccttgatctcctaccamactgttgaactcacataatttttctctctctagcatgagggatttttagcttttaawccttctataatgataagaacaatcatctataaagcatttatgttargcattattctacacatattacatataatcctcacaatgtcacagtctgtctccagagcctgggctcttcaccattgctctgtgtagcccacaatttatacatgcatctctgtgtctgacttgggaaaatgcataatcctttgattaaggcataagctttggagttaaacttactttagcattaatctttttatctcttcctggtatataatcttggataaattgttaatctacctgaacataagttctctcaactgtaaatggtacaattccatctcaaaggcctcttataagtttaatgagaaaaggaatgtaaacctctacgcagaagataccagtaatcactaattcccctcttctttgtatatctgcaggtggggtatcttttctgacccctctaggctcactctctgttctttaacacctttctctctgcccaagaggctgaactgtaaggacaggtcaacaagctcccttgacttttggttttcakttcaattcagccaatggaaatggtgagcaggagatggaaagaaataggccagtaaggtttcattttttattgccctggcttcctccctgtgaagtcaacttagacaagctgtcttcctcaatttggttatctcagcttaactttctccttcgggcttccagtaactgcttcctccccctcttctttcaagtctgtttggtaatagatcacttgttattagccacagggtactccacaattccctgtggtttccctcattagatgaccatataattttcatcaaagcaaactagggtgctttaataataccaggccagcaggcaaaaccagagtgtcctgagcaaacaagaatgtagggtcaccccacccagacttacctatgcctctttatgtaactcctagaaatccctcttaaattatcctcataggaatattacatgccgtcacggcacatagagtgataaacagtaggtgcaatttaaagtactacattgtggccaggcagggaggctcacacctataatcctagcactttgggaggctaaggcaggggaacgaatgccttgagctgaggagtttaagaccagcctgggcaacatggtgaaaccccatctctacaaaaacatacaaaaartgtagctggccaytgggrcaggtgcctttagttccagctacttggaagactgaggtgggaggatagcttgagccgaggaggcgaaggctgcagtgagccaagatcacaccactgcactccagcccagggaacacagtgagacccrtctcaaacaaacaaacaaacagacaaataaagtactatgttgtaattcatgtgtaaaaattaagagattataacatgaaggtatatatttcctttcctctttttagagccagattatttcttactggggttatccttatgaagagtatgatgttacaacaaaagatggttatatccttggaatttataggattccacatggaagaggatgcccagggaggacaggtattatttattttgttatgaaaggaaaaatacttaaagcagaggtacttagatgtcctgggagaagtcaagcagtttttgttctgaaattcttaacagtcctttccattaaaggagaaaaatkatcgccccccatctctctgtttaatttgtgtaactttgaagttttaagtcacttttacatacactgtttatctggtcactccttttcttcatgactttgtcttcctaccaagcaaacacaaaaacacatcgtgttcttaccctagtgatacctctgtcccgttttgaaaatcagaaatctaggggttattcttgataccaactctccctcaccttctacatgcaacctatcatcgccatctatcaattttgccttctaaatttctccctaatctgacaactttcagcttcaataatcwttcaaatccaggtttggatataatgtcttcaactactacaatgcctyctcactggtattaaactatttgtagtcagttctggacccaagtctgtgtgatttcatggtttaaagtaaatattaccctattagctcccacctagcaacagcatctcagcttgtcaaatcaccatctagtttagcctacctrccttcactccagcctccaccatgtccatcagggtgacccagaactccgccttcagcagytgttggtacaggagcatacccagtgcttgtatcagawcctcaagcttmttccaggtaggtagcagctttctgggtggcctgggcaccagcatgggtctgggtgaggtctatgctggggctggtgatatgggaggcatcacaattttcactgtgacccagagtctgctgagctccctaaargtggaggtggatcccaacatccatgctgtgaacacccaggagaagaagcagatcaagaccctgaacaagtttgcctccttcattgacaaagtgtggttcctggagcagcagaacaagatgctggagaccatgtggagcytgcagcagcagaagacagctgggagaacgtggacaacatggagagctgcatcaacaacttkctgcggcagctggacacatgggaccagaagctgaaggtggaggtggagcttgacaacatgcaggggctggtggaggacttcaagagtaagtaccaggatgagatcaacaagcatatagagatggagaatgaattttcctcatcaagaaggatgtggttaaagcttacatgaacaacrtagaataagyagtctcgcctaaaagggctgccccaggagaagagaagatccgtgagctgcagtcccagatctcggccacatctctggtcctatccttggacaacagccgagtcctggacatggatggcatcatctcgacgtctccgcccagtaccaggagatcgccagccgcagctgggccaaggccgagagcatgcaccaccaggtcgagtatgaggygctgcaggccttggctgggaaggctgagaatgagctgtgtcgcaggaagaggatcttccaggtgaaccgaaacatcagccggctccassatgagactgaaggcctcaaaggccagagaacgcagagcagcgtggggagtccgccattaaggactcaacgctgagcctgcagagctggaggccgccctatagcggaccaaacaggagagggcgccgtagcttcaccggaacctggagctgatgaatgtcaagctggccttgggcatcgagagcgccacctacaggaagctgctggagggcgaggagagcccgctggagtctgggacgcagagcaggtgtatgcataggargacaagcagtggctacccaggtgggctgggctcggcctcacaagctctgccctcagctatggcctggactycttccagtccagctttgactgtggyggggactccggctctttcagccgcaccagctcctgcagggccatagttgtgaagaagattgacccctgcaatgggaagctggtatccgagtcctctgatgtcctgcccaagtgaatgtccacggcagcacttcttagcttacccttcctgtggctgtcccacatccygctggggaggcagctgtgcaggggagcatgggcaactggagacccatctgacgctcagccctagytctcagcccaccctacagggatagtttgctgcctagggtacacctcttgcccttgcctccarctgaaaaaacaagtctattttttttttctgaaacagagcctcaggtatcctcaggaatctctgcaaaaaagaccctattagttcctatcagttctgtgcttaaacttcattaaagagccaattctagctccccgcaatgcaggtggctatctgttggggggggggggggggcgggggaagagcaattcatttcccagaaactatttgctcttgctttcttctctctcttcttagttcattttatactttgacatgtcgaataacaaaacttctcaatatcagaaagwctatttatttaaagaaaaactctagatttctaaaaagagaggaagatataatggtgttgctggctttacagagccaattatttcccaaaataactccataattacaaataactttgtaaatactcaagagaacttttaagtctctccaaacttttctcttgtcatttctatcacgtagctgccaaaattcatgagacaaaaagctgtacaatgagaaactctytttctaatctgagatccctgtgatttgtctcagactcagatcaaagaggcctgatggtacttgactatttaatggtacttaactttggcagagttagtaacaccwcttctttccctctattccaaatggtggaaaaatggacatagactcttagttccttggtcccgatggctgaaggctctctgagagtacaacttactcactctcaggaagccactctagttccaaaagtgacctgaggtagagtcctgagataacaacacagcatcacaaaccacttataaagcacaggaaaartctagtcacttcttccctctcttctctctttttccacactttctcacttctttctttttcctttctcttttttagttgaaatgttcctattttacattgggaataggatttttgtatcatattaacaattttaaactgtaaatttctacttacaaccttgttttttgctttctaacaattcaaatgaaatgaagcagtgcctataaaacttagcatagtgcttgacattcaatgagcattcaacaaatggcattttaattattgtttttattattttgaaaaaaatttaagtttttaatcagatgaatcttgaaaaatataatgctattaatataagtaacagtaatagagctaatatatatttactgtgccagacagcttttttttgttttgttttattttgttttgagacggagtcttgctctgtcgcccaggctggagtgcagtgtggcgatctcggctcactgcaagctccgcctcccgggttcacgccattttcctgcctcagcctcccgagtagctgggactacaacgcccgccaccatgcccggctagtttttttgtattttttagtagagatggggtttcactgtgttagccaggatggcctcgatctcctgacctcgtgatctgcccgcctcagctcccaaagtgctgagattataggcgtgagccaccgcrcctggcaaccagacagccttttacatgttttagttctcatcgaattcttataaataccctaggagatagcatttattattatttcccattatacagataggttaactgaggcacaaaggagttcatgcgtatcgaagggattttgaactagggcaaactaacttccacacttacataatacaatacattgtatataatcccttacaaatgagaaaacaagacagagaacttaaataacttacccaagtaagtagctcagaagggactagatcccaggtttgcctggcaycaaattttatctcttaacctttcttttatactacagaaattcaggaatgagatttttcttgtagacactgagaaagttcaaatatgaaattcttgttgccygtgttttgcagctccaaagcctgctgtgtatttgcagcatggcttaattgcatctgccagtaactggatttgcaacctgcccaacaacagtttggctttccttctggcagatagtggttatgacgtgtggttggggaacagccgaggaaacacttggtccagaaaacaccttaaattgtcaccgaaatcaccrgaatactgggccttcaggtaaagagaaacctattaatgaataaaatgtgtactttcctcatgcatatgtatgaacacctagtgatttttttcctgttttgtgtccaaatgcacccaatggaatccacaagaaggaaacaaacctttctttctctacccaaactttcttcacaggctctaaagaactgccattattattgcatggctgttttagaactcctgcctccgtcctggtgtctgcgtgtgagtgagtgtgtgtgtgtatgttctgggggaagtaagaagaaagcctgattacagaatagctaagcaacagtgctgccagcagcagcgcctgagggtgctgtctacttcagaagccacgcctacccggtcacaggagcaaactgatgcactggcataggagctaagaaccatgccttggaggtcatgaaaatcctgtgttccttggcctcgttgcctgccttctttctggaaaccactrggatttcctaattctatgccatagtccattgcacccttgcaaatgactagaaaattccctaggtaagtatttcttaaactatacataggatcagaagtaactgaggtcattgttaaatatgcagattactgggtctcttcccaggaaattctgattcagtcagtctgggctgaggtctgcaaatctgtttgctttattattctctcctttagataagcattccaggtaattgctcttttcagaggagcttggtaaatctgttatagaattaagtgaatacgactarccttgcaagaaaagcatcagtaggcctcgacaaatcaaatttttctgatttcagtttcttaaaaatgttgacttgcaatcaaggtgacacccttaaaagttgcatagttgcctaatatcatatatcgacactagtcttatatttaacaaaatcaaagtatttatgtcttcactgaaygtgtttaaatgttctaggcctaacaatgagatgacttttctaatttgttattccttctttttgatagtttggatgagatggctaaatatgaccttccagccacaatcaattttatcatagagaaaactggacagaagcgactctactacgtgggccactcacaaggcaccaccataggtgtgtttggggcagatgtgatcagagaatgtcaggggctcttcttccatatggctacatttactacaacttaaaatgaacaaataattatctgaaaactatgaactactgtcttcttccatttcagcttttatagcattttctacaaacccagaactggctaaaaagattaagatatttttkgcactggctccagttgtcacagttaaatacacccaaagtcctatgaaaaaactaacaaccctttccaggcgagtagttaaggtatgtgacttcccaagttttaatctgaaataactaaaagtagctctrtttccattgatttcaacagaagaccaatgacattttacaaacttctgagaaaataataggtattcaagatatccatgtaagttcactgatgatgtatgcaatcttattagcagagttcagggaactccccctgttgctaatctgccctactttcttcatctatgtctagaaacgtgtctgctgcgccattcctcaaccacagatagagagaacttatttgattgattggtttgttgaatttagtagattgaatttttctagtgatccctaattttttaggggcagtggtggttgagttcacagcatggaatcagatggtgtgtgtttgaatgttatttctatgatttgcaagctgggtaaatttggtcaagaccttaagttctcttcatctgtaatgtggggataataatagttcttactcatagggctaccctgaggactaagtaaattaatacagcatatcctctaaaacaatgtattgcatattgtaaacctttaataaatgttaacaattgtttttgttatcattagttttatagaatgtaccctcctccatcactaaatgcccaaccttgtttcatttcctgacactttacaggctgtcattttgacaattcccaaaacccaggcaaaactctaggcctcctaatctcctctagttgacagctaactaatctgatcatttatctagtccaggtaaattgcattgcatgggttggtgtgttttcttcttgtattttaacatgggcttctcccatggtaataactcccatggtggtgattgcacggttcagtgatttcaatgagagcagatgaaagtgaaacaattctgacagaagcctgaagatttaccgaagattctcattgttgagagctaagcaaattagcctatggtgattgaagttcatatctatacatcccagaaagacaggtagcagaaaaaccacctgaaaataacaaaacatgcttacattgcctgttggtacttgggcctcttataccattgagatttcactctggcctgctcctactattaagtaaacaatgtcagactttttgcttaattatttcagtattcccacacaattaagagatattttgggatggtgagatctttccattcctcttcatttgcacagctctcttcaaacttctgcataccctgacgtgtgtaggaygtggtgcaattcaagttaattcagccaaaagatatctaggagctactacttcaaggccctggcattaggaaacagctatgtctacaaggaaactttccagcttgttggtatgagtaaaaactagggtgtatgtgagagtagaatgggattcaactaaggaggtattagggggcaatggaaggaagtggtgtcatgtctaggagtttagactttgttctgttaatgaagggaggccattgaagaatattaaatagaaaagtggcttgatcaaatctataactttagaatgattgccctttctaaattataactccaatagaggaactatagtaccaatagaagaactgccacatatgacctactaattcctagtagaaattccagtattataatgacagagtaaaaacattgctaggcaaactcagagaaaagaaaaatactgctagctgttggaatcacaaaatactttttggataagatggcattttagtttgggcttaaggatatgatttcattatagagtgtggtatagaaaggctttctgaaacaagagagaaacatgagcaacattgaagtggtgaagctcaggccatggagaaccacacataactcactttactggagatttatrttagtatttgtgaaggagagtatgagaaatcatgttggaaatgtagaggcagatgataaagggatttgagcgccaaattaatgaatttggaatgtattatataagtaattggggagcatggaaatatttgcacagrggaatgacacgcataatgcccctttttagaaagattcccctgggaaccaaatgtaagcagatgagggtaaaggacatcaagaagggtgaaagattaggagaatcattatggagttattgttaacacatcagytgatagatgttggggattrgacaagagttgtgcactgatgagaagaatgattatggggttattgttaacacatcagctgatagatattggggattggaacaagagttgtgcaacaaaaaataatctgtaagatatgacaawgaaatgatagacaacgtttaggtatatttttgactttttgaggaacgggctttctttctcctctcctctcccatcagccagatgctcgcaggcatgcttggtgaaaggcttccttttttatgggagcttctggactragacaaccttttttctctctctgattagcacttccttttcattgatgctgccagttctttcaattgctccatttctattacattcaactcagttcatgagagttgaactgaattgagtataaagcrtaaagacttaagtcagacagaactgggttcacattctgcccctgcctcctgcctattgtaaccttggacaagttatttaaccatgctaagcctcaattttcacattgatagaatgagtagagttcgtcaagttgagaaattcattcatccattcccccttcctcacctcccattttgcccctggacatttatgcgtttgtgttcttgtcattctactttctttctgacctatagattgctttgatcctttgcttttgacgtgtctctacaacattaaagattgttagtactgtctccatttcttaaaagaagaacttgaggctcagagarcctaagcagcctgtcccgagtcacccagctaatggacggcagagcgagaatttgaacccagatctgaccaggcaacccatggtcaacagtcttttttataggtggaaaaaaaagtctttttccactttttcaatgccaacctgaagaagttagtgaacaagggtgaccagctcagtgggttgttgaggactgaaaccagcccatgttctgctttggcaagccatatgccctggcatggggccatgttgccagaaagaggggtgccttttctaattctcacacataccaaaagagctactagaaggagcctggctccctgctgttatgtgacaaatatgcctcctccagagccaacttggaattatatctacaagttggcatgtttgctactctgtatatgggtgctatactgctggctggcctgcattaatatcctctcttttagcttagggtaaaggagaaattattcacctttgagtaaatgcatagtaattttgctgagtcacaggatattgaggtagaatggagtcagagaatgtcctgctaatttactccgtatttgggaaagctaactccaggtttcagaacagagattatcttgtatagtcagatataatctttatttmatggaatatttgatattccatggaatattaatggaataaaagaagtaccaagatttcatactcctcttcctgtccaagagaggaagagagggatggagscagggaaaaaggaagggaaggagggagagggagagggagagaagacagaaggaagaggaggaggaagaagaggaggaagaagaaaaagggaagggaaaggaaggacaacaatatgttaaactagttcaaaccatacttctcaattctttaggtctggaaagtaataataagccttgtacatattatctgattgattccagactcttcattttatctcaatcactaggacacttagataataccctagataattaaacttgccaaattgtaattcttccagtgtaaatgtccccataataatttaataatagtagcagcatacactcataaaatgagcttctcttttaaaattatgttgacatttacttcatgttttcaagtgtgacaatttaaatagattgtcacacaaataaataattaaagtaaaaggcaggatctgactttaaccsgtaaacaaatttattttttatttatcaataacttgctttatttatcaatccatgcttggcaaaacaaatccatgtgaaagaaaatagccasttcataaaataatcaacaattaaaatacggtgttaagaaacaggtgacatctaccataatggattcttggttctctgttctgaaacctggagttggcttttccaaatacrgagtaargatcttaaagtgaattagatcttaaatgaataaatgctagttrttactgttctttagttgtaatttctggttaataaagaattctagaagaaatgtgtgtttatttttactgtaaataggtgtttccaaagttttaagaactaaaaaatgtctttttacctttatatctagtttattatgccaagattataaaactagtagctgtgaagcaaagaaactcacttgcaacactgcctgaaattacactagtaaagattcatttatgtgggttaagcttttgtcatagaattcattgaaggattctggaaggaatggctcaagtctgtattagtcactaattatgatagtaataataattacattaatttatactttaattaaataatactttgcatgtgcgctagatgctaggaactgcactaattgtcttttaaacatgacctactaacttcacaacagccctacccaktagaaaatttttccattttatagatgagaaaattcataataatagaaatttaaaactctcctaaggtatagaacgtgtttgaatccagaatgaaacacatgtatgcctcactccaaagtcttactaatttcctgtgggaactagtttctcaaggggcattctaaaaaccaccccaattaaagatttttgggaaaagccattaagaggtgcattggaaggattacaaagctaataacaagcctcatgatttcactaaggaccaacactgagcagatgtcacctaatactgtgcagtccttctttgaactatctctttctccacttttgatatccacgcctgtaagatttgatggtgttttaaattatcttgtaggtgttgtttggtgacaaaatgttccaccctcatacattgtttgaccaattcattgccaccaaagtgtgcaatcgaaagctattccgtcgtatttgcagcaacttcctatttactctgagtggatttgatccgcaaaacttaaatatggtaggtgtaagtaattgggtctgggaaaacatttgttttgttgcacagargtgatgaaagttatcctggattgtatggcaactgcaattcaaggtttcctttttgcatttggaatgyaattagtacatttatggcttccaatgagggttgagagtccacttgctttcataggaggatttgagaagaaagcttttctgccaacaattctcatctcttcttacccgaaacgtccttcgcttagataaaggctatggttttgatatttatcttgctgtgcctacgccttatgtcagacccactgaagtagaatctcagggggtgagtccagacatttgcatttttatttgtttaccaattttccactttcacagttgatttggaaagttattttgtgaacaacttacttccttaacccaaaaggataaaaggaggcatggttcttcaacaacagctacaaatttattgttcaaggggtaccgagagggatcagtgtcagggttcttgtcaagtaatttctaatttaactgagatcctttccatgatgacccaaggagttggggaagggaggagggaaagagaggagttgtgtttgaaaccagaagtaggataaggctgaagttggtctccacctctctcacaaacttctgcccagagcctactctcccagtcagtagaaagcactgattaaaatttttcttgctttcaggcaagatttataaaaggctttttatgcaaaacatgtcttagccattgcctttctatgttcctctctcactttctcagtgtacaatggaaactatgcttcctatcacttagatgcaaggatatatgtaggtgagagcatatcatgcaggcagagctgagtaaaaagaccttgaagcaaataaaaaagagtgtattttaaaagcaccctctcagcatagcctaagagtttgctaaagaaagacatcacaaaataacacccttgagtattcattggcccttgttgtccatatggacaccttttgtcagatcaccttttgtctttctgccaaaaagcaaaacttacagaatattacagcaccttcaaggacatttgtttcaaagaaccatagccaggggtacataagtaatattggtggaactttgaaaaaatacacatgtccagaactcaacctttgagattttgatttttattcagtacrtttggatagcttataagtaggttaaaatatttttaaagccctaagatgtttctgatgcttactttggtggaaaataactcttttaatttaaaaaatagtgcaattgaaaatatgagagaatcaagagtttttgtgtgtgttttgtttttgtttttgttcttgtgtgtgtttgtggttgtttatccataagatatctaaatataccgactgactgaattaattctgttacacaaaatttcagagtcctgtagaataytcatcacattttaaaattcagaaaacgaacgtcaacatwcagatctattcttagtgtcttagggccaacagctctctttgaatgtcctttgggacttaacacggggtgaaggagaagatcactggggtttttatyctttaatcycctatacccttgaacctatgggagttgagtctggaaaaagatagatttccttttgtctttgccccgygggatgccctctgtaggctttctgaagacactgctgaggacaggacagagctggtggaggaaaaagttcttcaaagatgggcttttttggttaatatgtcttcagattatatggtacatgttttttccttaaagaaagggaaaagasgccrggtgcagtggctcacacctgtaatcccagcactttgggaagctgaggcaggtggatcacgaggtcaggagagcgagaccatcctggctgacacagtgaaaccctgtctctactaaaagtacaaacacaaaattagccaggcgtggtggtgcgcacctgtagtcctagctactcgggaggctaaggcaggagaatggaacccaggaggtggagcctgcagtgagctgagatygcaccactgcactccagcctgggtgacagagygagactccawctcaaaaataaaaataaaaataaaaataaaaaaaagaaagaaagggaaaagaggaaaagaagaaactttttaaatttctctcaaatgtttacttgtggtatgatgatatgattagcctctagatgagaagtaatctctttgcagagtcgcttggatgtttatttgtcacacaatcctgcgggaacatctgttcagaatatgctgcactgggctcaggtaagtgcttcttattcctgcttgatgcacacatatctctgcaagaccctcaagaagtgctctcagagarctcactgcagggttctgctggcacctgccactgycacattgatgtttttggaatcagcatcaactcttcatttttatttacttcattcccatttcttctccttgtcctcagtgtctgggttttgagcatggttctcagatattctgactgggttctgatccttagatgattccaaactrcattttaagggaagrcttttatttcctctttcagaaagtcatcagctctaatagaactttatataaaatgatgcatcttattccagaaagagctgttcatcctccaatcaatatatggggcatttcagaatgtggaaatgatgctttattcagagaagattgaatgctagggaagaattaaartggatttatggcttatgtttttaccttcagctaaagttttatttgttttattttattactcaatatacagaaagctcagagataagtctaatccagttggtgtggctttctgagccttgtgtgtgtgtgtgtctttgtgtgtgcatgcgcacacacgtgcatgcacattcatttgtttattatgtaatatttgcctatattcttggctggtggctcagtcacaacscyttttgaaaagtgaacaaaatatacataattctatgayggggaaagtggtggtgtcttcttaaaggtttaatatatctgagaccccccccaaccaggaatttgcattttaatatatatcctactaaatttgctccctgttttagagaatcgctactatagatagcctgaaatacttggtgaggatttccaaaatacttggaagagtttgatcccaggagataaggcttcaagttcctctacgaagaaagatgttcaggatatagggcttcctactgacgaggagacagataggtcctcttatgagcatggccttccaggtactacacatttaacttcacagttattgagcacttaatatatgctcttcttgctgctcatacatatgattttattcagtctcactgaattattataacaattttttagtaaaggcattgatatccccccactctacaaatgtcatagcatattcttttatttatttattttttaagacagggtctcaaaaaaaagcgtgcagtggtacaatcacgttacccaggctgaagtacagtggtagaatcatggctcactgtagccttgacatcctgggtttaagcaatcctcccatctcagcttcctgagtagctggcaccacaggcatgcaccaccatgmccagataacgtttgtttctttttacaaagatgaggtcttgttttgttgcctaggctggtcttggactgctggactcaagcaatcctcccacctcagcctaccagagtgctgggattacaggcgtgagcactgcgcatggctgcctgttccttatacattttacaattgacttctcttaagaaaaacttttcccctttgacagagagtcctcttcaggatagaaataagtggggatggtggggggcatggtgaatatttggttataagttacataggcagctaaggcaagagtgatgatcatgatgatgggagtaatactagtgaaaaaaagctgtttgttgggtattattaggtgctacatgctttataggtgttamcataatcttcacaatcctaagaaagaatgttactatcattctcatttcacaaatatcttgccttgaatcacagattcagtagtctattaagcctggatacaatcaaggtatattagtgtctttcacactactataaagagctacctgagactggataatttatgaagacaagtgttttaacagactcacagctccacaggctgtacaggaagcatggctaggaggcctcaagaaacttacaatcaatcaccgtggaaagtgaaggggaagcaagcacrtcttaccacggtggagcaggagagagagagcacaaagygggaagtgccacacactttcaaacaaccagatcttgtgagaactcacttactatcaggagaacagcaaaggggaagtccgcccccatgattcagtcacctcccaccaggcccctcacctgacaagtgtggttacaattagagatgagatttggrtggggacacagagccaaaccaaatcatcagatttgatcctagagcccaagttcctaagtagtacgtcctattgcctctcatttctaaaagcttgcagaatttcaacagcavactgctgcctctctgaatataaatcatgatgagaataattttaaactaaaaatcaggactaaattggtaagtgggaaaaatatctgagattcaagctaagaaagaaaaacacagaatagtctgagaataatttaatgaagtgcttgacataaatgtcaaaattatctgcctcatcaatcctatatgggtggcaaataacagaaaaatgaagtgctgcatatatgcatgaccttatattctaatatttgragtttcaataccaaaatgcaaaagtagtcatgcacagtgtctcagtcagcccatggctacattatgcacatcacagcaggtggcttgactccacataygggaggcagagagcagccatgtaccttacacagaactgcggaagctcagtgggtgaatatttcttttaatagtaaaaaaaaaaaagtytaaggatagggaatataatcataacagtttagaccacatcatgaggataaggtacaaagttgtataataacaatagcagtaatttttaaatgtaagaaatgtatagctaatgcctttttaaaaaaattattaaaattcctgaagcaaagatattcaagaatcattcaattcygcatctttaaaaaatatttctgtgtgtaacatggtaacatttaaaggcattggatttaaatgaaaaatctgaggattttcactggaaagatacaggaatgagtaaaagattgtaccaattctgtgaattacgataagatttatcatttttattacttattttcttaatctttattgaaatttagcttatgtttctaaagactggggcataatgttaatcttctttgtatatttcttctgtactgtctttaaatgtacactattttcttatattattttaacgtgcttattttattttaggctgttaattctggtcagctccaagcttttgattggggaaactctgatcagaacatgatgcacttccaycaggtacaaaaataatcctcataatcagttccatgctgcaaatgaactaacaaaaatagtgtctactcatgaagcacctrccacttccatttaaccacactggatattgcttattgctgttctcacaggctgcttattgggttcttgccatatgccatatcattatttctaattcttacaaggaccttgcaaggtaaatattattatccctatttttttcagaggttcagagagggtaggtaaattaccagagttattcagctagtaaacaaccagagacaggggctcaagatggtcaactrgatacagccaggaagagtttctcccattaagagacaagaccatcaagaagattggaacactctgagcagatcttcagaagaaaggcattgagartgaatggaggtaggatgtggagcctgggctagagggaggattctgggaagcctgaacggggttgctgagcaccaggactcacttcaggccctgagtagctcctggggaagaggtgagttaaataggagtgcaatggcccattcttactatggacctacctgtaggacaccccacaacccccatagacatttgagctagtaggcagagctgtttggggagttggcagggwcaggactcttgcctgtgcaaagcccaaagggtttggtgcaggaacggttgcagtgaagtatggccagggacatccattccctaaggctcgccaagcacctctaggtagcgctggcctttgttgactgttgaacctgaacagaacagggctatcttacccacgggacagggccagtgtaatctgagcacatccctgtctgctggcctttctcagggttcctgcctggctgcacctgcttgcagcacagcctcacatgcccaaccagagtgcctccctgtggtcactgccatacctccttcactggcagattctgcctaggcataggacagcttttgcagatgggtccctaccagtgtgaacatacttgcagcctcccctgactgctttgcaagcatgcgtgtgtgcaaaccttgccaccaccaccaygatgaagtgcttttgccccacctcccatcagagtgttgttgccagtatatgaggaacatctcagcctctccagtgcagcagtggccagagaacaaagctttgcacatggtcccacctaccaaggttatagcacccagcccaggagtgctgagctgagccctggtaccctgaagtcatccagaaatgaagccagtcaactaaacacaacttatatcacagtcatattctcaagggcttcaaagaatatraaagcaaaaagcctcatccaaaggacagcaacttcaaagattaaaggaatatcagccaaaacagtkgagaaggaatcagtgcaagaactctggacatttgaaaaggcaaatgacctctaaatgaccacactaactctccagcaattgttcttaaccagattkaaatgactgaaatgacagatacacagttcagaatctggacggcaacagagatcattgaaattcaggagaaagttgaaactcagtccaaggaatctaaggaatccagtaaaataatttaagagctgaaagatgaaatagccattttaagaaataaccaaattgatctgatagagctgggaaactcactataagaatttcataatataaccagaagtattaatagcagaatagaccaagcttaggaaaaaatctcagagattgaagactggttatttcagtgaacccagtcagacaaaaataaagaaaaaagaatttaaaaaatgaacaaaatctgcwgaaaatataggattatgtaaagacaccaaacctacagctctctggcattcctgaaagagaggaagagagaggaagtaacttggaaaacatatttgatgatattgtctatgaaaatttccccaacctcactagagmggtcaacatttaaatttgggaaattcagagaacccctgcaagatagtatataagacaaccatccccaagacacatagtcatcagattctccaaggtctrtatgaaagaaaaaatattaaaggcagctagagagaaggggcagttcaccaacaaagggaacctcatcaggctaactgtggacctttcagcagaaaccctacaagccagaagagattasgggcttgtattcaacatccttaaagaaaagaaattctaaccaagaatttcacatacagacaaactaagctttataagtgaagaaaatataaaatatttttcagacaaaattgctaagggaatttattaccaccagacctgccttccaagaggtccttaatggaatgctaaacatggaaataaagactggtaccagatactacaaaagcacacttaaatacatagaccgttgacactagaaagcagctacataatcaagcctacataagaaccagctaacaacacaatgacaggatcaaatctacacatattgatattaaccttgaatgcaaacaggctaaatgcctcacttaaaatgcaaagagttgcaagttgcataaagaagcaagacctaactgtatgctgcctacctgagacctatcttgcatgcagtgacactcctgggctcaaagaaaagggagggagaaatatctatcaaacaaatggaaaagaaaaaagaccaggggttgctattcttgcttcagacaaaacagaatttaaataaacaattatcaaaaggaacagagaaggacattaaataaagataaagggttgaatttaacaagaatacaactatcctaaatatatatgcacccaacacaggagcacccagattcataaaacaagtccttagagacctacaaagagacttagataaccacacaacaatagtgggagacttcaacaccccactgacagtactagacagatctttgatgcagaaagctaacaaagatatttgggacctaaacttgacacctaaccraatagactgagcagacatctagagaacactcgacccaataacagcagaatacatattcttctcatgtgcacatggcatatactctaaaatcgaccacacactcaaccataaagcaattctcaacaaattaaaaaaaaactgaaattatactatgtacactcatgaatcacagtacaataaaagtagaaatcaataccaagatgatccatcaaaaccatgcaattagacaaccttctcctgaatgacttttgggtaaataatgaaacacaggcagaaatcaagaaattctttgaaactaatgaaaacaaagatacaatataccagaatctctgggacacagctaaaggagtgttaagaggaaagcttatagtgctaaacatccacatcaaaaagttagaaagatctcaaattaagaacctaacatcacacctagagaaactagaaaaacaagagcaaaccaactccagagctagcagaagaaaaaataaccaaaattacagcttaactgaatgaaactgagatgcaaagaaacatacaaaagatcaacaaaatcacaagttgyttccttgacagaataaataaaattgatagactgctagctagactaataaakaataaagagagaagattcaaataaatacagtcagaaatgacaatggggacattaccaccaccccacagatacataataatccctcagagactatcattatcacctctacacacacaaactagaaaatctagaagaaatgcataaattccgggaagcataacacctccaaagattaaatcaggaagcaattgaaatcctaaacagatcaataacaagttccaaaactgaatcagtactaaaacactaccaaccagaaaaagccctggaccagaatgaattacagtccaattttaccatacatgtaagaagagctggtgccaatyttattgaaataattccaaaaaatcgaggaggagggactcttctctaactcattttatgaagccagcatccatcattctgatgccaaaatctggcagaaacacaatgaataaagaaaacttcaggccaatatccctgataaacatatatgcaaaaattctcagtgaaatactagtgaacctaatacagcaacacatcaaaaagctagtccacaacaatcaagtaggctttattcctgggttgcaaagttggtccaaaatatgcaaatcaatatgtttsaggcatcacataaacagaactaaaaacaaaaatcacaagattatctcaatagacacagaaaagactcttaagaaaattccacatcccttcatgttaaaaaccctcaacaaactaagcatcaaagaaacttacctcaaaataataaragccatctcaacaaacatatgaaaaaaagctcaacatcactgatcatcagagaaatgaaaatcaaaaccacaatgagataccatctcatgccagagagaatggygattattaaaaagtcaggaaacaatagatgctggcgaggctgtggagaaataggaacrcttttacactgttgatgggaatgtgaattaattcaaccattgtggaagatagcatggctattcctcaaggatctagaatcaaaaataccatttgacccagcaatcccattactgggtatatacccaaaggaatataaaccattctactataaagatacatgcacatgtatgtttactgcagcactgtttacaataacaaagacatggaaccaacggaaatrcccatcaataatagactggataaagaatatgtggtacatatgcaccatggaatactatgcagtcatagtaccatgcagccaatgagataatgtactttgcagggacacggatgcagctggaagccatcatcctcagcaaactaacacaggaacagaatatcaaataccacatgttcttactcataagtgggagttgaacaatgagaacacatggacacagagaggggaacaacacacascagggcctgtgtgtgagggttggatggcgagggaagggaacttagaggatgagtcaataggagcatcaaactaccatggcatatgtacacctatgtaacaaacttgcacattgtgcacatgtatcctgtctgaggcgggcagatcacttgaggtcaggggtatgagactagcctggccaacatggtgaaacctcatctctattaaaaatacaaaaattagctgggtgtggtggcaggcacctgtaattccagctacttgggaggctaaggcaccagaatagcttaaacccaggaggcagaggttgcagtgggctgagattgtgccatggcactccagccyaagtgacagagcaagactccgtctcaaaaaaaaaaaagaaaacaataataatattaaatgccatttmtgacaaacccacagccaacataatactgaataggcaaaagcttgaagcattccccttgagaactgaaacaagacaagaatgtccactgtcaccactcctattgagcatagtactggaagtcctagccagagcaatcacacaagagaaagaaataaatggcattcraataggaagagaggaagtcaaactacttcttttcatggatgatgtgattctatatctaaaaaaccccatagtctcattctaaaggctccttacactgatawcttcagtaatgttttaggatacaaaatcaatgtaccaaaatcagtaacaatgtccaagctgacagccaagtcaagaacataatcccaatcataatagccacaaaaagaataaaatgtgaatacagctaatcagggaaatgaaagatctctacaatgagaactttaaaacactgctcaaagaaatcagagatgatacaaatggaaaaacattccatgttcatggataggaagaatcaatatcattaaaatggccatactgtccaaatcaatttacagattcaatgctactcctatcaaaatacaaatgacatctaacacagaattagaaaaactattttaaaattcatatgaaacccaaaagaagcctgaatagtcaaggcaatcttaagcaaaaagagcaaagctggaggcattacttgacttcaaactatactacaaggctacagtaaccaaaacagcatggtattggtacaaaaacagacacatagaccaatggaatgggttagagaacccagaaataaagttgaacacctgcaatcatttgatcttcgacaaagttgacaataacaagcaatggggaaaggacggtctattcaataattggtgctgagataactggctagccatatgcagaagattgaaactggaccccttctttttcccatatacaaaaattaactcaagatggattaaagacttaaatgtataacctacaactataaaaaccctaaaagaaaacctaggaaataccgttctggacataggacctggcaaaaatttcatgataaagatgcaaaaatttcatgataaagatgcaaaaatttcatgataaagatgcaaaaatttcatgataaaggtgcaaaaatttcatgataaagatgcaaaaatttcatgataaagatgccaaaagtaattgcaacaaaaaacaattgacaagtggaacctaattaaactaaagagcttttgaatagcaaaagaaactatcaatagaggaagcagacaacctaagaataagagaaaacattttcaaattatgcatttgacaaagatcgaatatccaaaatctgtaagaaacttaagcaaactaacaagcaaaaaaaccaaacamccccattaaaaagttagcaaagtacatgaacaaacacttctcaaaagaagacatacatgcatctaataagcatatgaaaaatggtcaatatcaataatcattagagaaatgaaaatcaaaaccatgatgagatagcatctcacaccagtcagaatggctattatttaaaagtcaaaaaataacagatgctggtgaggttgtggagaaagaatggtcatacaccactggtgggaatgtaaattaattcagccattgtggaaagcaatgtgacaatttctcaaagaacttaaaacagaactatgatttgacttaggaatcccattactaggtatatactcaaaggaatataaatcgttctatcaaaaagacacatgtacccgtatgttcattgtgcacctattcacaatagcaaagacatggaatctagatgcccataagaggtggactgaataaagaaaatgtggtacatatacaccatggaatactatgcagctattgaaaagaatgaaataatgtcctttgcagcaatgtggatgcaggtggaggccattatcctaagtaaattaacacaggcacagaaaaccaaatatcacatgctctcacttataagtgggggctaaacattgagtttacatggacacaaagaggggaacaatagacactggggcctacttgagggtggaggctgggaggagagtgaggattgaaaaactacctattgggtactgtgctcattacctggatgacaaaatcatttgtaagccaaacctccatgatatgcaatttacttatgtggcaagcctgcacatgtaccccctgaatctaaaataaaagttggaaggggaaaaaaatcaaccagaatacgayccaggtttcctggatttaaagtctagtcttctccactacacttattccttctcaaaaaaacaaaaacaaaaaacaaacaaacaaacaaaaaacatgtttgtttttaaagtatattctctgacttcttatctatgtttaataactaagactgcctaatagttctttaggatgtcatttactagccactttttaaataccattatatggatcattaaagatataagtaagaagtatcatttttaggaggtagtagtatctgccagggatagtgtgccttagcatgycattccctagcaaatagtactattttcgatctggtgtgtcaccagatctacgaaaacttttagagaaaagttttatattaaagggaaatgtgtattgttattgttattttattcccaagtatgtgaggaaatccaataatgattttggcttcttgcygatagactgagcttaaactgaaaaagtagtcatgaatgatacttgggtttttcaaatctaggatgtagaaatttgggaaaaaaaaattcttttttttaatttcttttttcttttacctttaaaaataaartcagggtctcattatgttgtaaaggctaatcttgaactcctggctcaagcgattctcttgcttcagtgtctcaaagtgctgggattacaggcgtgagccaccatgcccagccaaaaaattttaatgtgggaatttttaatgtcatcmtaacaactrctataacaactataatagtgaaaatgtataactcaactctaactgttgtgaaaaacctgacttttctccccagctgctatagttagatgtacgtggcaggagtggggtggggatatgccacacacacacactgtttcagaatacggttgtctcttgtgaggaaacagtggtgactaggtttacttagttcatatagtttttccaaargccccctaaccccaactcccaccaaaagatactatattctcaatggctatggcaaaaagttctagagggacctctggcccagttttagtcacgtgcccatctctcatacaatcactgtgacctgaagaatggaggacgaattggccagacctggttacctggaacagaggttgtgttgkatcaatacaagaaagaagcggtaagggaaaacttgctgagagtttatagagtgctatagccactctagttatttgtaacagactgactcctttttagcatcatacttcaaatgtctttcatgccttggtctcaatgctccctgaagagtctgctgattcccaaatattaataatgccactgagcccagatttgtgactargagaagggatatttatcctatccgacattttgtttgaaaaggtcacattctgagatcaaatgctaactagaaagatgatcccccatggaaaaaagaatgctcttcctccagaatcttttattttcccaaacgtgcaagtcagaaatacaataattgaattgtttttttcgattcacaattcatattactgcacgagaatggtttcaagtatttttaacattttaatgtttatataccattaagtgtaaactaattgtacacttgtagcatttaaagaacttgctcaacagctgacagttaatgttacttctataatgtaatattctgtaaaaacttttctctctctcttttattgtatttagcttacacctcctttatacaacattactaagatsgaagttccaacagcaatatggaatggtggacaggacattgtggctgatcccaaggatgttgaaaatttacttcctcaaattgctaaccttatttattacaagctgattccacactacaatcatgtggatttttaccttggagaggatgcacctcaggaaatttaccaagacctaattatattgatggaagaatatttacaaaattaaatgcactttactttctctaagcaagtggattttcataataataatgagatgaacagacactagagtgatccccagtgatttccagcttctagtatctatgcctttgtataatctcctcccattcaatgtgggtgggatatgagacttckttcaagccaacagaactggcaaaggtgtaagatgtcacacccttgattaggttttgtcatatggcaaaggtgataaaatgtcaatccctgattacattatacaagaagttggcggggcttggtggctcacgcctgtaatcctagcactttgggaggccgaagctggaggagcacttgaggtcaggagttccagaccagcctggccaacatggtraaaccctgcctctactaataatacaaaaattagccggatgtggtggcatgcacctgtaatcccagcttcttgtaaggctgaggcagaagaatcgcttaaacccagcaggcagaggttgcagtgagccaagatcatgccactgcacgtcatcttagcagattggagcaaaagattctccttgttagcttgatggaataaacagatatgttgagaaaactgaccttacaaggaactgagcatagcttttggaatctgagggtggcttccagctgataaaacagcaaaacaccaaggccttcagtcacataacctcaagaaaatgaattctgcccaaacctgaataaacttggaagcccattcttccctagtaacctcccattgagagagcatcctggccaacaccttgaaggtaacgtggggagatcctgagcagaggacccagttatgccatgcctggactactgacacacagaaacagtgagataataaatgtatattgttttaaactgctaagcttgtggtaatttgttatcagcaatagtaaactactactactatttgttattgttatataacaattatattaattatatgtttgattatattaattacataacataatatgatattatataatttataattacattatatacaatatattaaaatataattatgtattaaagaattagataacaatgtataataaatatgtaatatactacatatgatatgttatctgttataataaaattatatataatattaatatatgatgattattattctgtctctttggttaaaagtttgatagatctaaattcttgagttaacatattttaatatacattttcacatattttctgctaattcagtcacctctgtcatttgggaatttgttctatagattgatttttctcttagttatgggtcctgccttattgcatgcttaataatattatattgaatgccagacactgaattttgcattgctgattgctgaatttgtttttatttctttatatagggttggaaaacaatcacccaggcacaaagtcaatgatcaatgaatacatgtttggtgactgggagtgtcaagtaacatgaagcacttgattgagccctgtagaaattggggtattttacaacatgtaattaatataaacttggctaagactcatttatcaagaatttcctggcataaataaaggggctgtagacatgatggggaggatattaaaggagatctgagtcttagcaggggaaggctggctggcagggcaccagaagccttcacagggagacacctctttggtggctatggcatatcatactggcatatcctgacactgatcttgtcactgccccagaaatgactgcacttacacatgctgattcatgcaactgaaatgtacaaggatctgcagaacataaaacaaaacacatgtttataatttatatcaagaactactatttggccagactagtgttttcttttcctgtaataaaacacatgggaaattctagtatgaaactgttgcttggtgtacatggaagaaaacacagaagtatatggtttgacaaaaatcatcccctccacgatcattcaagttcactgagccttttccatgaggaaataatagtgtaagcattttacatgaatggtatcatttaatcttcatgatagccttataacatggtatcattcttatcactttacagatcaggaaactgaagtttagagatactgggcaacttctctaaaatattagttctctgaactctgaaaccttgactttaggtaaccaagctcttaacctttatgctttaatattataagtatgtattataaactagccattcagaacaagaagaatgataaggaaaacactgttcctgccyaagtggcactcagagtaatgaaaacatcagatactatacagctatagtttgagtatcctatgtccaaaatgcttgagaccagacatattttgaattttgtagtattttcatatcataataagatatgttagggatggaatccaaatctaaacataaaattcacttatgtttcatatacactatacaaataggctgaaagtaagcttgtatggtattttaaataattttgtgcatgaaacaaaagttttgactgtgttttgagygtaacctgtcgtataaggtcaggtgtagaatttttcacttgtggcatttcagtgctcaagaagttttagattttggagcatttcagatttgggatttttgtattaggaatgctcaacctatactaatttacatacttaaatctttaattttaatttaataattgtgatgaagtcatcaaaaagaagtacaccctccccagggtggacagggaagtcttctctgaagacatgaaattttggctgatatccgtgatatctgccagatattacaggtagggtaccaactcaggggtgaggagctaggttaaattaagaaaattaaagaagcccaaggagccaaagagagaatgggttgagatgagctcaaaggggtaggcagagtctggttttaggctctcctagccactcacggaatattgaaaacaaaatcattgaagtcttattttcaagaatacttaaaagataagatcacatatgtgattttaaatgatgataatagctatgatgtggagaaaaaagaacttcctgagactgggtaatttataaaggaaaggtgtttaattgactcacagttctgcaaggctggggaagcctaaggaaatttacactcatagtggaaggggaaacaaacacgtcttacatggtgacagacgagagaagtgcaagcaggggaaacaccagatgcttatgaaactatcggatctcataagaactcactcaatatcatgagagcagcatgagggacagcacccccatgatcaaatcacctcataccaggtctctcccttgagatgagatttgggtggagacacagccaaaccatatcagaaaatatttcactaataatgatattgactacatatggaaatgataatattttgaacacattggtttaaataaaatgcattttaaaatttaatttcaccttttatactttttaaaaatgtggccattagaaaatttaaattaaatacctaattcacattatatttctattggaccatgctcagatagtgaaaagagtaaggtaactatcccctgaaaattctggttatttctaggaaaatggaatatctctgcatttataagattttttaaatgtatggaaaaatgaaaraatacagactgtgtaaaagatatcagattgtgctatagtggttactaggtttaagaataatttggaggctgaaaaagagaaaaaatgctatcaggtagcaatttttaaattgtattcgtgtggtttgcaatctgtaaatagcaatgtatctcttccaatttagttaaaaaacaggacaagattgaatttttcccgtgaatttcctgttttctattaaatttagtaggtaatgttaagaaaaatttcctttgtaacagcaaagaaagccagtggaatttacagccaagttggtagcatatcaaagtaaaatacctgacacatactaygtacttaataaataataaataattcactattattatttataataacattattagtattcttcagtaactaagctgcattctctggacttccagaatcatctattcaatcactcattcactcagtcmgcaaaaatttttgatgatgatggtgattagaggaggaatgaaatyaagaaactctaaaaacaatttatctattttcaggggtgctggtgagatttgaaggtgatttaatagtaactcaaaatagaacattaactcaggaaaaaaaacaggagcatatatcaaaacaacaatgttacctctttgcacattccaatcaccatttatttactcttgcaaattagakgagacaaattaaaactagatccaacttgaatgtctagctaagtgtcctgtgtctttttttttttaaagaatctacatttgaatatacctcctacagaaattcaaatacaaaatgagctctagagaataccacacatacatgctgcacattaagcaggaagcgaggaaggtagatccgcctggggcaggaaaatgatataattttcctcatattcaatggtatggcccttcctcttcattctcacaaggatttgacctttgtcacaaacacggatggtcctgatcgtgtcactccrgaacatggacgttatcaaggacagctgccggcactcttggtaataatttctctttaaatgtaagtgatctttcctttgaacattttgagttgagatggatgtgtgttcaataaacttattatggcctcttcaaaaatctttaatattttagttaactatgattgatagatctttttgtcacttctctcttctattatagccattattgtttttaaagatggatgtagtatagatgtcactgaaacagagattcattttcactaacactaaaagaaagcatgttctacgctaatatgtaatctcaaaaacaacactgtttcttgtagtaattatgaacattcccaacttcgctttgagtaaagagatgaaattttaaaatataaagtattttctcttaagcaaaagtgtgctaattaataattttacacacacacatatagacttatggacacttatggttctattgagcactgtttgaattttaggatgcaaaataaattagataaattatctagtgagcaagagacaaaatccaggttcttgttcatgcacagtctttttactgtagggtgaaatttgtctcaaaagtgtgaggttcaaattatttatttttcaaaattctcactagtttccattttgctggttatggcctaacctttttaactttgagttattttcaagagaaaatttgaaaaagcagcctttgaggagaaagaagcaatccaacaaacaaaaagataaccacactgtaataggaaatgtgttttgaataggacattggaagaaaaataataatcatttttacagrtagatcccaaagtcaaggatctatgttcaaccatgtgtgttccaccatcttcacaattgartgagyaaccatcattaagcagttagcttaggccgtaatatgattcttggactgagatttcaaaaataccacaggccttctgaaaggttacccctttctagctccactatcatctaattttattaaaaaaaaaaaaaaggaaaaatttgagcttctagagagtaggggctaccattttgtatcccacagggccaaggaacaagttttaatgtattcatttaaattaatttcagtatgagtattgaaatatataatagaaatattgtaacattatatattttctatatacttttattatatagaaaatatatattacakaatatattattaaatattgtagaacaatatataatacagaaaaatatataataytcagtaatatattaaatacttattaaaatagcaagcttatataggaagagtgatggagcattgtgagaaagtttcagctttatttctttgacattactttgtttctgcacaaacaaaagaattacaggaattgtccagattattcaaataactcgaagttgaggagggaatataagtcaatgatgtagaaactcttttaagatttgagctagcctacaatctgtaaagatctgtgaaattgaactatatttgtgctatttccatattaagtcaaggcaacaaatcaatattaataataataacatagcacttctagaactttctaaagagtccaataaagttttgttagaaaggattgtttttgaagttaaaaaccatgagaaattccaggaaaatccacatacctatgccatcatactatcaatcagggcaaaacatgcttgagtctttcatcaagactaaatgattaaggagtggtacataacttttccctgttctgactagctgaacacttccttttactccacatttgtttaattggcatgaaatttcccactccactaaaacagatcttaggatttggacaacacaaaatatcatttkttttgaaaggatttgaggataaatccaaactaatagaactgaaacttctatattatgctgggtagcaacttagttttccctacccttcttcatgctgggagatgaaagagattcagttacggcttaagctccacaggcatacaaagtgaagcagaaaactgaggcacgtgtgcctccattatctggtatctcatgtggggcttagaggtaaattgtcgttatttggcctccatttctgcctttaaccactggtgtaaacaaaggttactgtgccaaagttgacagcaacccaaatccctttggcatgtgaattagtttcctctgccatactgctagttccaaattccttctggtttcaggatttaggagtcagggttgcctcatcttctcaaatgagttacagtcacgcacatccctacrcactgcatggttggcactagttccttgatatatgttactccgtttgatcctcatgaaggatcaaatggggaagggagatactattgtctctgattgtccattaagatcttgagtatgttctacttccctgtttgacacactggtttgaaaatgttgctaagtcttcccaacaatgacagatactcagtggaaacatgaaggattccgtcaaactggttattttgcatcatgtagaccactatttcccaacctgcaagtgcatcatggcctttggtgtgtcagggacacgccttgggtgtgtgtctcagtctaaagcttcctccttttcacaagcttcctgtttctcatctctctagcttctaactgtcactgtaatcatctcttactcttcagcctgatgtcaaaagcaaaagttcagaagttcctcatcaataaggagtccttgtgagcaggtgaagctcatctaactaggtaagatgaagatctatcataaccaggaggcaggttggaaggtgccagttgcactggcagtcaggtgcaagagctctgcagtgaggctgcctgagtgtccatcctagatctctcacctcttggctctgtgaccttgagcaggtcttaaatctctctaagcctttgtttttttaattgataaaatgaggataataatagtaccaaaattagggagattttcagagcttaaataacataygtgaactatttagagtaatgcctgccataaggggactcagtagcttattattagtttcatacaatttgaaaagtttcataatatttgcagatataagatgatcttcaaccagatagctaatgtatgcaaagctatttagcttcagaagtaaactctgcatttctagargttaaatattactttgttatagtgaattatctgtaatatttatctcttgctcacttttataagaaaaatagtgaaagcatttattaagaacttacactgcactaaatgttatatatgacttaatcctcactataaccctatgagataggttacattattgtcctaattttactaacaaggaaaccaagagacaaagctactaaaacacttgcctgaggttagacatcttcttctgtggtgaggctggatttcaaatttagaccatttgactgtagcacttatatgatgagcaygctgtttagtgttatagtgttggtctacctttgaatagacatacttttaaaccatggcaaggaagtgagactgcacattgaaataygyaaaatttgcctttgggtgccacgtgagaaatartcacatcactagaaactaatcataagcttttgtgtttggttaaagttttattgatccatttttcttgtttactttgtgggatactgggcttaactaggggatacctccactttttacttggccatggtatgaaaacctgtcctctgaatctttagatattttgkcaaattgtaggcaaacaaagacttaaagcaattcaaccttgattaaaataagaccaaaaatgcctccatacttgattaaatttatttcattttaggaactggattataatcaagacaacttctacatgaaaaaatagattaatagtgctccaagttagttcactgtatttattcctttttatacattatctgccttcggtgttattcaagttttcattaatcattaataatttcactaatcattttatttcattaatcaacattgatagttaaaattaatctgtgaatattaaatgttttatgccaggcatttctatgatgtggctgcttttaacaacaacttgtttgatctgtggaactttaaatgctggtggattccttgatttggaaaatgaagtgaatcctgaggtgtggatgaatactgtaagtcatggaaaactgtgaagaacatcaaataaagcaggactaatggagtatgaggttacgaaaggtcctgttgtaacagaaaatctctgataaaacagataaaatgtagatggtttttaacctctgcaagagtcaagctagttagatctttgtctgaaaaacaaatactgtccggtaatgaaaaccaaattgtgctattgtgctatctatctatctatctatctatctatctatstatctatctatctatytadctattyawctatctatctahagatagaacctcctcttttgaatttatgttttaagaatatcaagctatttgttgatrtacatgattgccttctattgatctatagttctattacttttaaagcaagaggggtctcaaaagacaattgacttgataatatagctttgtcagaaagaatgggtcaatgctaaattttcccccaaccccccaaaatattagccaatagtagatattttttaaaattctacttattttgtattaagactttatttattaattttacagttacctggtgctacaaatttcagataattcaccctaataagcacacaacagatggtttgttttgattcctttttatatcctttggagaagttccactaacgactgtatttttacygggcagagtgaaatcatcatctacaatggctaccccagtgaagagtatgaagtcaccactgaagatgggtatatactccttgtcaacagaattccttatgggcgaacacatgctaggagcacaggtacaagatatgtctctcctgaaaaggggactgcattgacctcctgcttctcaggaggaatttaatgctagatatgcatcaacagagtttatcaaaattggtttgaattattggattagyctttaaatagttatcagggaggctcactctttgcctgataattctctgaagacagacaggaacctaaaaatacaaacagcaagactgatcttgctaactgcaaccagaggtacttgttagggtgtaaacagaaaggcagagcctgcattttgtcacctcattactgatttatcatgtggaaaattgctttgtcccaggaaaatggatcctctcattgtcagaaggagattttctaggttgtatgaaattgactctggggcacccaagaagaacctctcctgctcccactaaaattaaggggcctccctctgcaggataaaaaacaatctagttaaatgacaacgcatttctgaaaagttttccaggactgaaaaccttaacatccacatacactttgatctaagggacagacggttcatagaatgaaagagtatggtgtcaataaggcttgaattctagaatgaggagccagccatgccatagcaggggaatgatactccttaaaagggaaaatttaactacaaatcctctgaagtagaaatgatragaataaccaaaatatctgcaatggttcaatagcaaataatttattggcagctgcttaccgtgttcattttgcatcttttttcccaccacacatattaaggagcagctgargtcatgtttgacattctctccctcttttatctccagtttcagaatgaaaaatgagagtgagatatgagtagttttactagttaaaatatgaaacacccagttaaatttgaaggtcagataaacaacaaataattttgtataagtctcattttaagataatactaaaaagtcattatttattcactattatcactatttataaaattttgtagagcatcctggawctttttgcttacttttgtttttattttttgctaaatctggcaatcccaggcacatgtgtgaaggagctgtgaaatataaaaggagaaaacttttatgggaaagatttggcttaaggagagataattttggaaagatttagaattaaagatcattcattagatgtaatgttctaaatactttatatcagttaaacttctcatcaacaatatgagatgggtaccactaatagtcaccatttcacaaatgatgaaattaaggcacaaccggttatgttaagaggcctaaagtccacaaatagcaagctgacagaccagaatttaagcccaggcatgctggctccagagcctgtgctcttagtcattaaattatagtgccttacttgaccttccaccctggttctttggatctccctgaatgctctctctccctcagaaatctggaagttggcagagggacactgagctgagcatattattgtagtttttaaatgctctccactggacagargatggggatttgaatagaaatttggtgaggaactaatcagtgtccatttacactcacctcctcttcctccctggaagagctataggacttgagtaagcatgataaatttyrtgtctttgtaaaccacacccaggaaatttgtatatacaaatacatagagcacagtagttatcaggacagactttgacataaaaagaactgggtttgagtccctgctctggccttcttatctgggtggccctctgggaaagttacttaactacataaagttttgtttccatatctacaaaatgaggtttctcaaaatagcagctagtttatagagttgttgcaagaatttagtaagctaatacatataaatacgtcaacatagcaccaggtacaaaaatatgtgctcaagaaactgaagttacctgattataatgctctatactattgacaagggaaaagtgaaaacagtttttgttttaccatgtgtgtatgtgtgtgtgtctgtgatgtttccgacatgctctatttaacataaattactctcactctttctctctctctctttctctttctccctctctcatcttaccctttcccccaccaggtccccggccagttgtgtatatgcagcatgccctgtttgcagacaatgcctactggcttgagaattatgcyaatggaagccttggattccttctagcagatgcaggttatgatgtatggatgggaaacagtcggggaaacacttggtcaagaagacacaaaacactctyagagacagatgagaaattctgggcctttaggtaaatattagctaagaaaactcaagggggaaattggaggcaatttwaaaaaaataacgtggacgctattaatgattatctttgacgcttraagtcatatagctccttgtagtttctgttaagatctcaaaggagggtaacagcaagaagctctgatttttcactgattctcccacargcaaagtatggcatttcaacaagatcatttttacatccaattctgtgaattctatgcattaaaagtatgtccaaagagacagctcaggaaattatcatgaccaatgtgcacattcattcagccaatgtttactgagtggctactgtatgcgctgttctaggccccgaacattcaaacagggaacagacaaactcygacctcacaaagcttatgttcattttagtgataattttacaagtcattgctcctggatkgccaatcaactgtgtaaagatgatttggaccaggaccttattgatttagagaaactgwgattgatttagagaaactgagatcgcacatagtaccattttcaggaaaactccaatattagatttttaaaaccttkttaatgggcaatgaagaagaatcttttttgatatcttgtttcttttaatggaagagttttctgctgtcaccagaggacaggctgatgcctgcgatagacttttctttcttcaggcctaagctccctgttggtttgtaaacctgatgctagaacagastgtgtattcctaytacattaataaaacattcagtacccactgaaagtttgagaatagtggaggaatagaatagaatgttatagtctgagttcttgggcaggggcaagcatcaggaaatattgaatcattagtctttaggaggtgtcacaacaattctcctattcttgtaagtcccaatctatagatttcctcacatgttcttttaataaacaggcttctagcttatggaatacytgatttgactaaatgttatataggcccttttgttcctcctgtctgaagaacaaaatactagtactatggaatattggtatatattaaatatatatctatatatccatgtggacaggaatactactactaacaacatcttactgagcacccactggcagccagagtcgtttctttcatactattaaaccccgttagcagccccgtaaaccaggtactaccctgtttatttcccaaatgagaaaacataggctcagagcatttcagtaatttctcaagagttgcaaaggccataaatagtagaatcatgatttacaaaacccctgtttccaaagatgggtattaaatggtcctaacaattgtgaagcctcatgtgggagtcagaagtagaggcacacaagccagatggggaaagggagggcaaagaaaagcaagagaagggaaggaagaggagggatcataaggttgaacttcaaatatcatacacaagtttcgaaagtgttcctcttataaggaagtaaaatgtacatatgcagaaaaacaaaaagctacaatagcctacatataattggataaataatgaaatacacattgaatctaagtaaacagcatagaatctgggtgtaaaaaagaagtgagcaagtgctctgagttttaaacttaaacttgcaagtatttataaaagcccctgttttattttgcagttttgatgaaatggccaaatatgatctcccaggagtaatagacttcattgtaaataaaactggtcaggagaaattgtatttcattggacattcacttggcactacaataggtatgtttatgagggtcactgttaggtgtgtttttgagggtcagttttctcagagtcttacaggagttcacctttatgttggaataaaacaactgttacttatagtgccctcaattccctgtcctctgctgggaataaccctagtactctaagtagctgtgagcctgcagtgcacagactatatgtagggcaaacctttcctgggtctcwggtcacagcagcatattgaytacggtgatgcaayttcccaggaataacatgtgttccaaattcaaagaaataattccacagagtaagtttctagattccctctgagctgaaaaagtaaaattcaatgccatggaatatggctgaaacataataaatgtgcatcaatcatctctttctcacaacccaaatgggatttttaaaaaataaaagggaagggcttatacctatatttaaacaaaytgaaaaggcatggttatatttgtttgtgagttggaacacacaagcttactataataaatcaattgagcttatctattcagtgtgtgatttagtatttatgaaatagcaagtaaatgtaagcactatgtagaaatttctaaagttttttaagctgacaacttacttcttaatttacttactttacttaatttactttacaatttactttccagrtattttggaaagaaatcaataatctagttccaagtaaaagttgaaaggaacccacactaataaaagctttgaatttgtcattgaacttccactaaagtttccaattttaagagaataaatcatgtgaaagtgcaatatttcagtttagggaaatattttcattatcaccactatcatcagtaacaaacatatattcattagtattttagattgacaggcactttccaagctcagaacaggcagttagcatcagtcagcatatactaaaaaagtatcaaagaactcataggagatcaaaaatgccaccaataggcaaataattacagtatctaacacttattgagcattcgttatgtgtagggtcttgtgttcaggaccttccccacagtatctccctctgatcttcaaaacaacccgaatgttattatccccatctcatagaagaagaaacacaagttcagaacacagattcaaaccagatgtatctgatttcaccaatagggtgtgtaaggattccggagaaatggtgtagagaagaagaaatgactttagttggttttggaaagtgggtaggacttagatatgctcttatacttgatctgcaaaaaaaaaaaaaaaaaccatggagaatttgattatctgtgctctgtgtttcatttaggacataaatatttttagtgactgttgtttgcattttggacagagcaatttctgttatgtaaggagcacccactctttgtaggacatttagtaggtcccagcccattaaacagggctctgcagtcagcgtgaccctcaaaaatctcacctccacacatttccaaacaccctctggggaagtactattcctgattcagagtctttttatcaattgttcagtcaattatttcagttcttctttttctggccaagacagttttaatgttccaacaagtgtttcagtacacacayacacacacacacacacacacacacacacacacacacatgcyagtggaggcccaggaagggacctctggaaaccaaattatatggatattctccctagcctacccagtgttgtgctaatctccatcctcacagatatacaaaggggtgcaatgctactgctgaaagagcaaagcaaatggagatgcctggtccttactgggccatcgtggatgctagggaaagcccctttctttttggaaacagggaagagtctagagggttgaaaaacacccagtaagacactgggagcagtgaaatttcattccatagtgagaaagaaaacctgttagaataactgggtgatgctgcagaaagaaatcaattcacctcctgtgactgattatttgcttctggaarctctgtgattcattctggcatctcagagttagggatgaaatgagaatgttgccagcatttaccccatgcttgggaagtttacacagcagtagctactccagcagcttaaccatcacctttcccctgccaactactccatttcccccaatcaagtcaaactgtccataaatagaataaaataaaattggagacttgagagcagagaagactgaaggcagattatctttatagaataactcagaagacttccaattcatccccagtatgatcacgatagaaggaaaaaatgactaagcagagccccaattttgttagaaacaytgcgtaagtatttatttttacaagattgtcttatctcctgttctctcagggtttgtagccttttccaccatgcctgaactggcacaaagaatcaaaatgaattttgccttgggtcctacgatctcattcaaatatcccacgggcatttttaccaggttttttctacttccaaattccataatcaaggtaggctcctttcaacaaaatgtacctgaggatctcattttggatcataaatccttattattttcaaatctactgtaaagtaaaagtaggaaatttagataaaatctatagaacttagactctgtgggtatgtgcttgtgtatgtgtgtccctgcgtgtgcgcatgtctgtgccatagtatctgcaggttctgtaatacaatttactatacaaggtcatcagcaggctgagtatatgtcagaatttctagctgaactgagtgctatatgacaacaaggatttttcttgttttcccaagtgttttttkttccatttagtcaggtaggtcaatgaattcacattgcccaaatgaaagacacttcaagttacccataatcactgatgtgtccaattttgacattagaaaaacctgattaatatattccttccaatatggaaacttgccctaataactaaagctaagattccaaagcctaaatgtattacagctcaagtattaattcaaatatttattggttatttttcaggagttgaaaaagtcatttggttgccaattgtggatttgggattttatctattaaagggttttttttttttttctctttgcttttgtttctctacaaaggtcattgccacaatgaacacagcatttaatcaaattccagattggcctttgaacttgggatgatggataaaatggatttgggccaaaattgaagtcaaggagaccagttagaatatcaaaataattcatatataagaaaatgagacgttggtttggggtagagtggtaggaatgaaaaaaattatttgtgagctaacacaaggaataatttccatagggcctaataatagttaggtctgataatactatggtctgataatagttttattgtattgtttactgagagcacaaatgatgtaacttccttattcaagagcttttctagtttatttaaaaatgtgttgacatcagttaggttttaatgttttctatatttggacagtgtgagcaaactaatttgttaaattaaattcagagagagatacatctatctgtaaatacatatatgcgttgtttgtgttgctcttcctacataggtcagctataaggcaaataatgttcctgggttatctcagtttcacatttcccactgtcaatattcctgctacttttaagtcccatatcctgctcttttcttccgtcagtttcccccagaagctccaagaccccaccaggaatccccatccaagtttactttcccaactcctggaagtttcaattgtgctgcctttgtgacattatcatatcttttctgttcaatggttgcttctctttggctcactgttctctacttttcagcctgagagctggctaatctgggacagtactcgaatgcagtgtacacatgggtaacatggaaaaccccgattttcccttatattcaaggtattatttgaccttaagaaaaacygttytacatttcataccaattaatgagaaaaaaatattggcaagcactgactgggcagaatacagggaagcttcactatggagaagtgaatttgggattgagggcctttattgcaatctccttgtaaataatatttgatactcttcctcatctggagacacattcctaagtaacttttcctgaataatttggtctccttgactgaatcagtaagtacaaatagatccccaagcatggctctttcctagaatgaaagaaatgtcaagaagtctgaagatgattcttgaattttggttttttgctattgctatttgggcttgttgtccttgttgttgctattgagttgagctccttatatattctggttactaatcccttgtaatatggatagtctgcaaatattttatctcattcaaagataattattatttactttcataggctgtttttggtaccaaaggtttctttttagaagataagaaaacgaagatagcttctaccaaaatctgcaacaataagataytctggttgatatgtagcgaatttatgtccttatgggctggatccaacaagaaaaatatgaatcaggtatgtatgataattatagggccatttgataccttaagaaattccagctttcctttgactcattttgatatatctatttactgtataaattcatatggtattccaaacccttaaagacagatttttttttgcttttaaaaatgtttatgggtatataatagttgtacatatttatgagacayatatattttgatataagcatacaatgtgtaatgaccaaatcagggtaattgggatatccatcacctcaagcatttatcatttctttttgttagagacattctaatttgactcttctagttattttgaaatatacaatgaattattgttaactatagtcatcctattgtgcatgccagactttagtccttctaacggtattttggtacccattaaccaatgcctctttatccttcccccwcccctactacctttcccascctctggtaaccatcattcttctcactatctctataaggtcagtttttttttaaactcccctatatgagtgagaacatgcagtatttgtctttttgtgcctggcttatttcacttaatgtaatgttctctaatttcatccacattattgcaaatgacatgatttcattcttcttatggctgtctatatgtaccacattttatttatccactcatctgttgatggacacttaggctgatttcatatcttggtcattgtgaatagtgctgtactaaacatgggggtgcagatgtctcttccatggattgatttccttttttttttytgaatatagacctagcactggaattgctggatcatatggtaattctacttttagttttttgaggatccctcatactcttccccatagttcctgtactaatttacattcctaccaacagtctgtgcaagagttctcttttctccacattcttgtcagcatccattattgcctatctttttgataaaagctattttaactggagtgagatagtacttcattgtagttttagttcgcatttctctaatgattagtaatgttgaacattgtttttaatgtacctcttggctatttgtatgtcttcttttgagaaatgtctactcagatcttttgtccatttttaaatcagattttttttttgcaattgagttatatgacctctttatatattctggttactaatcccttgtcagatgggtagtttacaaatattttctctcattcaacaggttctttagttcactttgttgatggtctcctttgctttgcagaagctttttagcttgacgtaatctaatttgttcatgtttgctttggttgcctgtgcatttgagggcttacctcaaattggcccagaccaatgtcccggagtgcttctgtaatgtttgttttttagtagtttcatagttttaggtcttaaatgtgtctttaatccattttkattttgtttttgtatctggcaagagatagagatctaatttcattcttctgcatatggatatctagttttcccagcatcatttcttgtggaaattgtcctttgcccaatgtatgttcttgatgcctttgttgaaaattagttgactataaatgtgtggrtttatttgtgggttctttattctgttccattggtctatgtgtctgtttttatgccagtatcatgcagttttgattattacaggtttgtagtataatttgaagtcaggtcatgtgatgcctccagctttgttcttttttctcagaatcttatatttagaaaaacstaaagactccaacaaaaaacctgctagaactgataaacaaattcattaaatttgcargatacaacatcarcatacaaaattcagcagcatttcaatatgccaagagcaaataatcttaaaaaaaagaaagaaaaaaaaacaagaaataatcccatttataatagctacaaataaaataaaacacctaggaataaaccataccaaagaagtgaaagatttctacaatgaaaactataaaacactgatgaaagaaattgaaaatgacattaaaaaatggaaaggtattccatgttcatggattgcaagaatcaatattgttaaaatgtccatatgatccaaaacaatctacagattcaatgcaatccctatcaaaataccaatgacattcttcattgaaataaaaaaaaagcctaaaatttaagtggaaccatgaaggtagatgtctgctatacatagaagattaagtactcaacaaaccttgaatatgaagactggggaagtgaataggcagcttcactcttctattccctggtgaaatttaggagaatggatgttttataatgggtagcagtttcttacatgttctcaatcagccataacttactacagtcaatttgaatttattgcatttgaatatattggattaaaaataaaatcctaaaaaaggagagaagcacatataaacctgcgtcttatttcatgtgttcctttctttgtgggtgacttttgttttgaartaaaacctgcaaaataacaggacagggtggaagggagatgggatcccctctttatgaagaagcagcagtcctgttttatcacctcttcattttctgttattgagaattcaagaagaaggaggaggaagagttcacatccacagactggtgtggttgaatagttgtctctactgtattccaaatagcagccaatgaggctgttacagtgaagccagtcccaagataattgttctgtacccctattctctaagaagctaaattgtgttagactgaaacccataaggaaccattgttcaaagttggcttgytcaaaagtaaagatttttaatagtttctcttaattagattattttctaagacatagaattatgattactattttatctctataattttcatctctataacgtttacaaatactgaaataacctttggaaaaaattggcytttagctttacttttgcaatattttattttatccccataaaagcctaggaaattggtactatgacttttagtatgttcatttaatagatgaaaacacagaaactcaaagatgttaaatatggtggccaagttcacaaagctgatcattaacaacaacagggcctgaactcctggttttctgatttaatctgtgacagtgcacctgggtgcgcatgcatgcatcacccccacacttgcacatagaacctttcctagttggctttgctccatgatgaccattactgttccttctacttcaaaataagcaaattatcctacagattcagagctggtacaggtgtgctgtcaagcagcccattccattagtcagcttgtggttcactcacattaaagtattgacctwaatggtatatttatctagataattctaccttgttattttcaaagccccartcttgtttgctaattctgtgcatcatttttctctgattctgaaaggcaaaattttgttgggcaattgctgtaatatgagttttatctcctttagagtcgaatggatgtgtatatgtcacatgctcccactggttcatcagtacacaacattctgcatataaaacaggtagagtcttagtcatggaaaaccattccaatccttattttcaatatatttaaaaagacagaattgaccctgttaacaggcctaccctaagaatcttaagagcttgcttccagtttgtccttgctgccttctgtatgccttgatttccctggaatttaagagaaaggatgttatggtacagaccaagtagatgacataaatgaacaccaccttaaatcagagttttaaaaataggccctgaactgaagcaagaggtaaactagrgaagcctcaggagaactgagacttctccagagagaagtatctgggatttaacttctttctaatgaggcttggttttccatgaacttttcctttaaaccaaggggggtattgctcatctttctgttgagccccrtttgtcataattgtaaaatgggtggttacatccttctggtgatctaggagccctattttcgtcctagcatacagcatttttctaaaatktgctgttagctttcatgattcttaccytaactattctttttctaaaaaacatttgtttcagctttaccactctgatgaattcagagcttatgactggggaaatgacgctgataatatgaaacattacaatcaggtgagctatttacagtaaccccagcatgctgattttgataaattatartaaaaaattatttgagggtggaaagactcctacctgtcatttggtggcatttatactgatagaacttttttytaaaaaaattttaattttaattttaatttatttcagaaaatttataaattaaagaagcatatacaaagaaacttacatcatgtgtaatccttccatccagagataactagatgtactaacattttggtgtatttattccaattttctcagtattatattgcttttagacaacttttaatctttctattttacttaagctatagtaagagataactaatataactgagggatttttaaatgcatttttaatggctacataatagaaattatttcataaaaatctttacagcataaatgaatatacactttttaataccaacagaaaaattagaattccatatgaaagttgaataagtattacccaacattgaagacttgggtcgtaaggcatctttctccatatagctttatgacataaaaatctgtagccttgtttagcaccgtacttttaattaatcctgtcaccatttttctgttctcatagccaggggcttggcttataagtatgaactaagcaaactaaattaaattgttttaagtattttcccaggctatcatattttaagctatttactggtgcaactatagattattaataagttgtttctgaggatcaaaacaatcagactaatcaatttctcaataatgaattggcctgttagaggaataattctactaatccttaaaaccactacaagagatagaccatgtatattttatttatttttaaaaataagtttaagatgtgatttacatacaagaacattactaattttgtgtgtcccatttaataagttttgacaaatatatttatttgtgtaaccacaccacaatctaaatataggacgtttatatcaccactaaaagtttttttcctgctcctgagactatttatagacacaaatgcgtgtatttgcaaatgcttagaaaaggtctagaaaaaaaaacagtaaatgttaaagtggttatcttcagagagaagaaagaagaaaagaagtggatggacatgaaacagtaaaggaccctcattttggactttacatatgtctgttttcttccattattttgaataaacatgctatatttataaattatttacatttacaagaaaatgaaacaaaatcaacacgcacattcaagatcattatggtcaagtactaaagtatgtgagagtgttaatgtccttagaatttgtccacagttagctggtcctactctgctccaagccggtcctattttgtgaattaatctcatttgatgccaatttttattacattctctccaaaaaactagtctcaacagtttgctctctcctcaagttcacagcattatctctgctatatctatattttattgagtataagagaattaacccatgtaagctccatgagggtagggatttctcatcrttttgttcaccagtgttttctcatctkgaagagtacatgacaattactgggctcccagtatctatgtgttgcattaatgaaatttcttaactttaatctacctcaaaatgtctctatcttcttgattctctccttcctttctctatcagaaaatgatggtcctcttattttccaagttattccggtcctgtgcccttgatcccatctcttctcacttccccttccttcctgcctccattctcctgtcccttatgaaaaacaagcaagaccatcaattctatcaagttatcattatgtcactctgttcttatcaacatatttttagtattgaagagggcttcttctacttactcctkaaccttgtacaatgtagtttaggtcttcatctttttatcatagctaccttatttaaagtcacccatggcttttaattgccaaattcaatggcctatcttcaccttttgaaatgtgttatgttcgttaccacagtctccttgaaactcagtcccctgacttggacttccataacacaatgatttctgattttccttctgtttgtgattgttccttttgtcccaggcactggctactccaccttccacctctctgaaatcattagcattccccaaggattcttcaaaactctctttcttccttggagaagtcagcatagctttaatttggaccatttctatggcttatctagattttttcaggacttgccttcaacctattctttctgtaggtgattccattaactgttgcccatatggtagtcygaagacagacctccgagaaatgacccttgtctccaaaacttccgcaatatgtccaaatttcctagcctgacattcagactttgattatctgcctccaagtttatatcctatcatattcctttayatattctgttctccaggtacactgggaagcttgccattcctgatcatagcctacaaactcttcctgcytcccactcaccctcatctctgctgtcaaaatgcaaccttccctcaagagtcatttcacaggacccctctttctatgaagccctcaggtggaaataattttttgcctttttttccattttatttttggagtgtttatggcatttaacataccttactttgtatacaaatatttgccttgctccctcttttgcaaatttcttaaaggtagagaccattgtatgttttcttcatatgttgctggtgcctaacagaactatggccattgtccacattcatttagcagcctttgtagttattgctttgaggagcttyctctcatgaatgcccttgctttctctcccacagagtcatccccctatatatgacctgactgccatgaaagtgcctactgctatttgggctggtggacatgatgtcctcgtaacaccccaggatgtggccaggatactccctcaaatcaagagtcttcattactttaagctattgccagattggaaccactttgattttgtctggggcctcgatgcccctcaacggatgtacagtgaaatcatagctttaatgaaggcatattcctaaatgcaatgcatttacttttcrattaaaagttgcttccaagcccataagggactttagaaaaaatagtaaccaacaatgaggttgtcccccagcaccctgggggagatgcacagtggagtctgttttccaagtcaattgtgttagtgttatttatgtttagagacatctttgcatgggaccatctacaggtccttataaacaatgaggtagattaggcaaaaagataaacaagttgctactctatctggcatttaagtctaattaaattgtaatttttagggcataccatgaagtatagaaatgtctgaagcttcaaaggaacagtgaaattcctttaaggtcctatatggaaacctctgttgtcattttatttatatggattgctatggcaatggacagagtgtgggattaggaggagggcctgtaacttctttataaaagtttcttagctatcctgaagacgtatagacatttttacttttttaggtattttcaacatcagaaattcaaaaaagtccccaaagattcttccagagaagccctcttttcttacaatcttatccctggctatctgcgtaaacggaatcttgaacccataataggatacatgtataaaatcttccttattaaagcagaaataaattgtacagcatcaatatcattttataatcatagggaggcttctttgtttagcatgtaatgccccctttacaggctttttgttctttgaggggtttgaacattccatgaaaaactgacagataggaaactgacaataaaagattgagctaaagatggaagcagaaagtactaggctagatagtctctaaacattaagtattttcttcctccatcttaaaagcaatgagaagccaccaaaatattttacctaatggaaacctgattgccgcatttttgtaaccaccactttggctgctacatagagaatggattagaagatgccaacaaaagattctgagcaagtctgtaaatctgatcaagtgttctgatgcaggctgatatccttctgtgctaagagagatgatccttggaaaatccagagccagctccataatactttcctgctctgctggcaaatccacaagctgctggcccctggagccattcttctctcaaaactagcattcatcaatttaatgtatacgtattgatggggaataatggtcactatgaaaaccatgtgataatatggaaaaatacccatgatataatgttatgtgaagagragaaaatgaaactggtagaactatgtgattgcaaatatatacaaatattaaaacaattatatgactttataaaatatttgtatataatgaaaactgaagcaatataaaaaataaaattagttgtgtcagggtagtaacatgatgagtgattaatagtttttaatttttaatatagtaatgacataatgttacaacttgtccaaatctcacaaacataatattcagtaaaggaagataaacataaaagaatacatattttattatacatttttatgtaggctaattgatggttctgaaagccttaaaaagcttacttttaggaggagaatcatgccttggaggactctagggtccagaaaaatgtcctaatactagagctaggtgcagtcagattaattataatacatttcattattttgtctggaataccaagatgacttccaagcaggaatggagtctagcaacactttactgatggggaacttggccacagacttgtaatacaaatttttggatatgttgacaatgtttctccttatttttcttacttatacaaagcaagaaatttggctcacaaccttgaaacagacttaccaggttcctccagtttcccaagcctcaatatctcattgctatttttaatagaacaaggtaaataataacatgaatgttattcaatacaaattgatgtcaaatgtaaattctgactcagaacattggtgaatttctttcaatcggtataatcaatcagtttcagagaggcgaagtcttgctcaagtgacagcctttttgagactcattaaccaaagaacaaggcacgtgtttcaccatcagggctttgttcaactttgatcacctctgcattctcctctcataggaaggttacccacattttccaaggtctggccacaataccaccatttctgaaacgttttgcctgaactatatgttctagaattactgttccctcttctaaatcactttttttttttagacagggtttcactgttgcccagtgaagttgcccaggctggagtacaatggtgcgatctcagttcactgcaacctctgcctcctaggttctagcaattctcctgcctcagcctcccaagtagctgggagtacaggtgcccatcacatgcccagctaattttttgtatttttagtagagatagggtttcactatgttggccaggctgatctcgaactcctgacctcaggcaatccaccccgcctcggcctctcaaagtgctgggattacaggcatgagccaccgcgcccagcttaaatcactttttattatgcttctgaattatctttttggagagttctgtgtaagtctactgccctaataaattttaagtagcttgaaaacagaagcatttaagatatagaactctccattaccacactaaattcacttttgctattcctttatggtcaaccaccactaccaccatgaccagctctccttgaacttgatccctgacaacttatctgttctccattgctataatgtcttataaataaaatcatggagtatgtggccttgatattggcttttttttactcagcatgatgtccttgagatctatccaagttgttgcatatatcaagtttgttcctccttattgctgaatagcattgcacggtatgcatgcaccacagtttgtttaactattcactcactgaaaaacacgtgggttatttccaagttttggctttatctttttggtgtttcactgcttaatggcatgtcttgaaaataaaaaaaaaaacactccgctcagattcattaatttgacttaattgcaagtcccacccaaagctaaattttctgtgctaataccttttgtaatctgtacactgcctcaagggaaaatgttactcaagtcagagttcccattgacttgactacacaatccttgattcatattttaatttggcatttagagattgyaaaacagtgacgtggttctcattacatttttgagttctaatgtgatttaagaagtgctttggagtagggtgaaaacagattgctagtatttataccttgattgactatgaagtccttcctccagccattgtcaagatgtgacatgtctttagctctgtcaaaacctccatcagcatcatcatatctcccacagagccaaaccaaataaaagtaatcacagtaataatagtgtgcaatcattaaaaatctatgtgaagtattaatataaaacaccaacaatttttagtatatagatataaaaaggtaaattctataaaaacagtacgctttctatggaatgcaccttcaagaaagtttcatcattctcctccattctatttcctataagattgtccataaattccatttatggaggaattctggagtcaaacctttcttctttttgtaccttctacacatattggccattttagttggtgtgtgaatttctttccttatcaaagcagtcaacttagctaagaaagattatttatttgggatatgatgtggccttaataagcttaatcaaaataagcacttgtatggtatttgatagcacaacagggtgactatagtcaataatttaattgtacatttaaaaataactaagagtataattggatggtttgtaacacaaaggataaatgcttgaggtgatgagtaccctatttaccctgatgtgattatatattatatgactgtatcaaagtatctcatatatcccataaatatatacacccactatatacccccacaaaaattaaaaattaaaaacaaaataagcacttaaaaataccttccacatcctgccactctacccctacctcaaagagaagattcccaaggaaactctaggtaatgaaaacctggtcctacagtctatgaaagtatgacttcaacagtgtgtggttcagggagttctgaacattcaaaacagaagcaaacaaatcagtattggggtgaagccaagggaaaattactgaccacatactccacaagacttgtctcaggtgtacatggaacctgagaatgtttaatgttataatgaaatacgtattcatattacaaagttacacgtatattttaataattataaaatgcaaatatcgtaagtatagtgtgatactcaatagcttcaagtgtattttttggcattggcataatacatatgtgtatttccatagttatttatatgtatctaattttaactttgttttccacttttttgatatacctgctagccatttgatatgtttcaagtaatttttttcacgaagaaatatgttttaaatattgtttgcacccttgagtgtctgagaatgttttttgttgccttaacacaaaaggttaaaacatctttctaccacaaaattctgtagacatttctctattttcttccagagtttagcattacaacagaagtgtgtaaagtcacctttgtttttatctatttgtaggtaacccgttgtggatttttagaaaataattaactttctgcttatatrcttgttttatattattatggtttggttttcatctctgtaatgaaatgaacttagcaagcatatttttgcaaaggtatcccctttgatttcaattttgcagcgaactctttcaatctgcacttacatgtttcttcaacccaagttttcttctatcatgccttcgaatattgacatcaattccttttcgtcctttgttttaatctagtcaataatctgttacctatatgttttttcaatgtctaccatcttctctgtcaaagattatttttatttctttgtctttttctctgacctgtgggcttggtaatcaagtctttctcaggatcactaacgtacttctatgcaattctgtgctttacagtctccagtgtgtttaatcatttttagttttctttcagtttttctttatcttgtccatctttctttatccatcaaactcttgcatttttattatgaacaattgcagacctgcaaaaccatataaaatacactacactgaacatctatatttactaccagggtctggaaattaaacattacaaatgaagtttgtctcactgcatcaattttggtatgtttttccaggatattgtttgtttcacctaaatttatgtatctttctatgtatgtatattaatatatgtattaaattgtacatatctatgcatatatttctggataggtgtatgtaaaatattacatatgaaagccacctttttgaccttttttctttttatttcataccgtattctttttatttcagtatattcttgtttcttatattttattctgagtttttttaaaaaaaatcttagcattagctgtgctaaaaaatgaaagtactccccaaagaagatgcaatatttttatcagctgcgattcacatgtggccaggcttaatggtaaccacatccttcctgagtgacctttggagatcatccaccatctcaccataggctggtaaccatatttctcagcttactccacgtgttttcttccctttccagaatgggaaaacttgtgattggaagtcaggtatcttaatttctaaaagcaagcatctatatctgtttagttcatttgatttttggaggtttattttgttttaccttgagcaagtcacattttctgggcctcattgtcttccaacataaaacaaaataatctgattagatgatttttttctgttatcttcaaataagcaccttattatcaaatagttcagtatcagaacaagattcctaa

SEQ ID NO: 6805 - DNA, 366803 bp, Homo sapiens
  misc_feature (1)...(366803): n = A,T,C or G, or insertion/deletion polymorphism (see Tables 1-2)
gatcaaacagtttggccaagtggcggtcactattgatctgagaagggcaatttcagtggagtggaaggagagaaaagtctaaacaaacgtatgggttccagagtaccctgaaggaaagaaagtgaagatggtgtatagactatcctttttttaaaaaaattatttttcttttttttttgagacaaggtctcactctgttgcccaggctggagtgcagtggcatgctcatggctcactgcagcctcaacatcccaggctcaagtgattctcccacttcagcatccacagtagccgggattacaggcatgtaccaccacgcccagctaatttttttgttttttgtattttttgtagagatggggtttcaccaggttgcctggattggtctggaactcctgagctgaggtaatctatacgcatcagcctcccaaagtgttgggattacaagcaagagccactgtgcccggcttggactattcttctgaggaatttttgctctaaagagacagagggaaatggggtgataagatgaaaagtatagtagattaaaagagcttttttttttaagatgggagaagtaatagcatgttggtatgctgtcgagaaagatctagtagagaagaaaaaagagatgaagctgaaaagaagggggaaagctgctgaagtatggtttttaaggtgtataatttagcctttgaagacatccattatagcacccaatataaatgaagagaatcagagaaaaataattgcgggttttaagagtactgccagacaattaaactaaggtaaaacaaaaatgtattatcattgtaaaaaagggaaatatcgatatatagaattgaaaaggaagtctccaaattaatccacttctacataggaaagtagtacttatcaaatatctgtagtatctaattttacatttagaaatgatcaagaaatcacaaaataaaaaacaaagaaggcgaactatattaaaactataaactctctatgcaaccaagaataaaatatctaaaagaaaactgaaattagattgagaaacacatttgcatgaaatatcacataaggttaattcctttattatgtaaaaagctcagacaaaacaagtaaattatcaagtaaccaagagataaatgggcaaagtatatacatactgtatgcataatatatataattaataaaaatctggacaagcattcaactgtgctgataaataaaatacaaaagaaaacaatgagatatgttatatttattggtaaagtattaaaaaattaaaacttccgattctggctacattgtgataaagaaagtactcacacattgctgctagcatgtaaaatattaatattcttttggaaagcaatttggcaattcatatcaatgatcataaaaatattcagtgtttgactcagaaatattcctcttgtatttttatcccaaagaagtatgtacttcaaaagaagtatatataatgtccattatagcattataattgcatttcagcattacttataataatgaaatattaaaaattatctaaatgtaaaattaaatacaaatagatgaatggctaagaaaataatactggcctgatcaaacagaagatactaaataggatttcagagcaacatagaagatgcttataagatttcagagcaacatagaagatgcttacaatataataaagactagtataacatttttactatactctaattaaaattatgttacctacacacaaagtgattcaaacaaaaaatgtatattgaagatacttcaaacattcagcatgctgggattttaggagagcatgtttttcctttttctgataactactactagcatttactgaatgcttactatgtgccagatgctggactatggacattacatatagtaatgtatttaatcccatggggtaggttatgacgcataaatggcagagttaatagttgaatttggcaatctggcttttatcttgatcttaatcacaatgctagatcataaaaacaaattaagaaaagttagggaaaaaaatggaatttccctcaacttatgagagtcatgtttcaaaaggtgaggtgtggatatcatatatgaatggaacatcattggtaatctcaaactactatcccttaaaaattggtaactattcatgcctgtaatcccagcactttgggaggctgaggtgggaggatcacctgaggtcaggagttcaagtccagcctggccaacgtggtgaaaccccgtctctactaaaaatacaaaaattagctgggcatggtagcacatgtctgtaatcccagccacttgggaggctgaggcaggagaactgcttgaacccgggaggcggaaattgcagtaagccaagattgtgccactgcactctagcctgtacaccaagagaaaaactccgtctcaaaaaaaaaaaaagtaactaatctgtcaatcttgcctgtgatgttaaagtaagctgagattgaacagactgtaagtaatggaaaaatactttcatatcatcacagaatgctaaggctggacaaaagagcttggcggttatcaggtccctttgcctcttctaagaaatagaaccaaggtctataatcagcaagagactgcctcagggtcattcagctggttaaggtaaccaaagccagttctgaattccaagtttcttggtaacaatccagtgatatttcttcctacaccattttactcacttccctcataaaaaagctatctatatatctattacgttttaagtgcacactcaatgccaagcaccacacttccacgttttagttaaactaatttaatctttacaacagtctttttttttttttgagacagagtcttgctctgttgcccaggctggagtgcagtggcacgatctcagctcactgcaacctttgcctccagggttcaagtgattctagtgcctcagcttccctagtagccaggactacaggtgtgcgccatcacgcccggctaattttctttacaacggtttcatgtggtatttattataatgacttaaaggcaagaagactgaagctcagaagggtttagcatgctgcccaagaccacgcagctgtaaacagtggtatccagggccaggtgcggtggctcatggctgtaattctagcacttagcgaggaaggtgggcggatcacttgaggctaggagttcaaggccagcctggccaatatggtgaaaccctgtctctactaaaaatacaaaaaaattagccgggtgtggtggcgtgcacctatagtcccagctacttgggaggttgagtcatgagacatgagaattgcttgaattgggaggtggaggttgcagtgagttgagatcacaccaccgcactccagcgtgggcgacagagagagactctgtctcaaaaaagaaaaaaaaaagagtggtgtccagggctaatttctctggtgttaaagtgcaggatcttgggacaaagtgcttctacatacagggtgctttggttatggaggttccctgcccatgctaccagaggttcatgttgagagaagggtctgatcttgctcaggaggaggtggttgtctcagtaggttagaaagaatcaagtaaattctacctcctggtgtgaaaaaggtttccaagtttgtgtagatcctgtgattgctctttcatgtttagagagagaaactgagtaaagaggaaaaatagaatgatgtttatattctctacaagtgtgctttctaatgtgctaatgtgttcacggctcacaaaataacagttcctgacacttgagaaatacatttcttttcatgacattttcttcctcacattattgctccctgtcgttagcctcaaaccttacattctgtagctcaagtactttaactggagagaggctttaatcccctctctccagttagggagcctcctaaggagtctccttgtcttccaggtctccattgccaatcatttcacagaagggcagagaatcttccaaagcaaagctgttgctgccttataacatttaccccttctttcttgaaaacaggccccaggctacctttccagcttgctttttccccacccgagtccctcacgcccactgtaactaatctgggcttttcctcctctgggctttggctcacgccggtccctatatctggaatcctttcctttttcatctttggctgcctagattctgtccattcttttttgttttttttctgaggcacagtctcactctgtggcccaggctggagtgcagtggcacgatcacggctcactgcagccttgacctcctgaatttgagcgatcctcctacctcagtccctgagtagctgggattacaggtgtgagctactgtgactagctaattaaatttttctttttttgtggagacaaggtctcgctatgttgcccaggctggtctctaactcttgtgatcaaacaatcttccctccttggcctcccaaagtgctaggattacaggtgtgagccactctactgggcctattctttaaggcccatctgaaacgtaatctcccttgccttttctgattctccaaccagatatcccttccttgtccaacactgggtattagagtgggtgtaacttttacaagagttgacatttggacctgtactgcagatatctgtgcacccaaactgtcaattcccatgatcaactacgtgttactgacctttgtgttataggtagcacctagaacagacattcatattcattggcaattatgaaaaacaaaagtctaaaagtgcttcacaattttctgtcagctgaagaactggtcaaagaaatccagaggctttttttttttttttgtaaagtacagcttcttaatagggcacttgattttctaggtgtggacacaacagttgatagacatctactaggtcaagaaaggtatgcctgaattagataaatgacagactcaaaagagaggccaggaaaaggctgaaaaacaatctgaaggcatctgtggtatccttttgtttatatcttgatttttagtttcgtacaggggaacacaggaagctctgaggctttaaaactagaaactttgcgatttaatcaaatgaaaaattttgaatgctgtgctgcaaatctgattaaatagggctagtaattcacttccaaacaaaataaaccccaaactcagaaaatctagctccttttaacaaaaagtctggtaatgttatttttcctaaattctaaagcttatcagagaagcctgccccctcacataaacattttttcatatacctttatgaaaccttctgagataacactactacagaggtgaataatgaattcataggccctagctgtaactacgtcattgtttacttggtgactttttttttaatcggggagaggggtaaaatggagatgagagaaaatcagtttaaactgtattcaaatacatttacacgattaacaccaccaactcaaggaatttctttttcttacagacctgtagcacttgttggtaggagaacaatgaaatgaacccataatttgaacaaaggcaacaggcacctgcagcctttcaatcacttagcaaatatttccgccgagacagggccgaattcggggatctgggcgagcagccggtgtcacctttctcggtaagctgcaaatcttgggaaaactaggacccttcccagggatcctgggctgggagcggtctccggtttttagacaaatctctcctcctaccacacgtgaccgaatggcaatcagccgccaagagagacaccgcaacgcatcagccgcgggatacaaaggctcggcactgccgtcgcatcctcgggaggatcgcggagcctcccgcgctcggcgtctgcggagcctgcgcagggagcagctgcgaggcgcgccgctcccgggcccgcagggcggtgccgcgctgcgcggggagcaggagcggggagcgcgcgccgcctgccctgagcgcctgcccacccagcgccgccggagcaggggcgccgcgccgcaccgcacgcagccgagcagcgccacagccgccgccgccgtcgcagccgcagtcgccgcagctaggccctcggccgtcgcagggagctccgcagcgacgtggaccaaggtgaggaagccgagggctcccccagaccctcggcaggcccgaggccgggctaccccgtccccgcccaggcccaggccttccctttcctctcggctccttccccttcccacagctcccctgggcctcgcgccggctgcagggcgcagtgagaggcacttacaccacggctctggagatcatccaggacaccatcttcacgggggcttgggccccacgtccggggcgggtgggcgcagggcgctgcggaccaggccgccaacggcaggccgcgcgcttcgccggctcctcgcgctccccggggccgcgctggcgccctcaggagccgggcccggtgtgtgcgcgcggcggcctgggctgcgcggcggtcggtcccccgcccgtccccgcccgcccccgcccgccggcccggcagcctagtccggacagccccgcccctgcgctccgctgataggcggtggcggcggcgcgttggcccgggccagggctggggccaggcggccgggctccagggctgggctggcgggatcctagcccgcgctggacggcctcgctgccgcggccttggcccctgcgctctaaccaaccttaccctccttagctctttgggacgcccacctcgcggcgagagtggggcaggaggctgaggaagggtactggagggtagggattggcagtgyctgtgtgaaaagtgagatattcgcaggaactcggtgtccaataaaactctcgaccaggccctggttttggagagccaagactttgaggtgtgcctggccacatccggtatcctcagtgtttacggaggcccagcaccaaaggcgtccttatattaccacattttaaaggaatcgtcgagaggttcttgcacaggcctccgtgtgtgccacgagtctcgtggtgcaatgcagggagggacagaggaggatttcatgtttgcagtagtgggtgcagtgataccactgttctgggcctcttagggcaccttttcatcagagcatctgcaaagactgtttacagacacgaatctccattatttccctgaggcctgccagatgttcaaagtaaaggctgggtctaggattcctgacctgtcttaagatttacaactatattacagctgtaagatttacaactgtattttttggaggttgggttactgcttacaccttgctgttcttgcaaatatcatttcaagggcagacttttaaaactgttttttttttttttttgtgacagtaccaaattgagaaaatgatgttaaagtttagatatttttattttttccagttaagacgatagtaaaagataattctagtattcagatggtgcgragaataaaagatgaaatgtaggcttggagcctttaattaaagtcctagaaaatatgatggcttttgtgaccatactgtaattttgtcttcttgttcctcagtttccctgtgataaaaagggggtaataatactgtagtctgtctcttgcctttcaagggtgatatgaggcactgctaaataatatgtttaggaaatactctgacttgcatggaagacaatcaaaggacacaacagattatcctaaattattttcagttctcagtcaataaattgggtaatatttcattatttaagaaacaagctcagaagctactttctactcttgggttaggttcttttcgcttattaattcatgtcaagactttttatttcaggaatttgagtaataatttgcatttaactctgaatcttttatttttggccattattcagcattatttgaggatcaggtgtgctgcataagcaccagttttttggcgaactctcttgttcaataaaactcaaatgaatttgaatatcattcagatcccttcatgaaaggtcctgaaatagctttacagcctttacttttactactttcacccccaactcctaatgtacccgttccctacctctcttctttcagccaacctgtattttcatgctcagtgcttttgcccagatttcgtttttcccttaacactttgctccccattctgtacctatcagaactctcatttttcagtggcctgtgccatgaagacatccttggttttcctcagggacaattattcctaattttgtctgtgctctcataatttattacttgaatttctatttcttatctgtgtcattctgcctctaccatgtctaatgtactgaatggtaaaatgtttgagaacagacatggtgtattagatttctttgtgttttccaactatctagcctcagatagggtaaacgtccaataaaaatttgaataatgtttgtgaaatacagtcactctttaggcatcagatttaaaaaatttcagccacgtacattggaagtctcttaaaaatgtctttcttgcctttttactttggaggtcatcattgtgaatattaattatttcagctaatcctagtacattaatgccttcaggggttgctgaaggcaacctaggtaggatggctggctgctctctgaaatgtccctagactgctgtgcgttaagtttcattttgtatgcttattatatcttctgcctcttccacatttagattactttttgctgctttctttctrtttacctggaacagtgccttttttcacatctcaataggccatgggttggaaaccacctactatgtgctatacacgtgtcattgagtcattctgacaacttaaaaagccakatagcgtttattcccttttggtaccatggaaagtgaggtttagagaagttaactcaactggcgggtgatcacataggtcattggtaacagaactggagatctaattcatgcttcccaagcttgtttacattatactgggatagatagcggaactgtgtttaaggcggtgggtccagcttggtgttgccctccaaggggaaactggaaggcattttttagattgttgtaatgattggagctaacaacttgcatttgttgagtgaaggctagagaggtgtgggacagtcctgaacaaagtgtccccatgtcttgcatgatttaagaatatctgcctgactttcatgtagtatttgtaattatcaaagcctggaacctccatcttgcatcatgattttaactgagactgaattttaactgagtctgtttccacatgcaacggttatgtgaattgaaggaagattgttttgttcacaacttgaccaagaattgtttacagttttggaaaattgtatcacaaacagctctgcattcatagatatattcagctactagttacttctttaagtcttctagtgtagttttgccccacgtcgaaatatatgttattataaatcattttcatgtctcttttccactcttatttagggtatatggatttgtttgaaattgtaggaatattgttattttgtttcagggtggtaaagcagaagttggaaaatattttatgcaaggggcacattgaatctgatgtggttgagaactgttgatctaaagtaagagtaacttcatctgagaagagtctctcatgaaaagtgcccagattttagtggagggtgtttataatttctgtgtattggactgtgtctcagatacacagaaatctgccaaatttattagcagatagttgagatttgctaagaaataagtggccattatgctgggtgcggtggctcatgcctgtaatcccagcactttgggaggccgacaagggcagatcacttgaggccaagagttcgaggccatcctggccaatgtggcaagacctcatctctactaaaaatacaaaaattagctgggcatgatggtgcacacctgtaatcccagctacttggcaggctgaggcaggagaatcacctgaacctgggaggcggaggttgcactgagctgagattgcaccactgcactccagcttgggtgacagagtgagactctgtctcaaaaaaaaaaaaaaaaaaaaaaagtgrccattagataagtacttcactgtataagataaggtgctaggggcactgggagaaaaggaaatatagtaccttctgcctagaagcttttatagtgtggtctcttggartgcttgaaatcatttcttatatagaagatatgatttctttaagtactgaacttaattttgattttatacatatatcactaatattcatacattgtgctatataaagcgcatccttcattgtgttctgcaaagacacttttcttctctgaggaaggcaatgtatttagggcaaaggacattctcacaggagacctagttctactaccggtaataggatgtttggtaaatcacactgtatgtttcctgttgaatatggggatgatactgttatgaagatcaaaaataagaggctttaaaatctaagggtaattagactgttaaaagcattggtttctcttttaaatattagtttycctaggagatatgtggaatgtgcatcttctgcatgttaaaagagttcatttattagyagagcaacagagactaagaaagtacctaggagagcaggtagtgagagcagaattagagggtacaaagataatgtctgatccctgtaattattaatgagaatgctaatgagactgaatactaggtcaccttcgcatttctattaagagagcattttcagtggctaaaaaatatatttatttggagaaaggctaaaattactaaatgagtctgtctttcatagttgtttagaaaatagggggagagagaggatcttaagaagactgacataacagaagaaagctgttctttttctgtctgctgctagatggatacctcttttctctcaggcagtcgcttatggaattatggttacaacagaggttcagtttggcttcagagattgaatgataatgaaatgatactgaaaatacaatgatcagatagcaatagaataaaaagattaggttctgattaagtattcactataggtattggtagaaaaagatggtgactagctgacaacacaaaaagtaaaatacatctgtgatggctggatctgggaagcacacacagtaagaaattgacattatctgagattcttacacatttccagtagtagccttaactataacaattaaggatttagacagaagcttttgtttttccttcatggtaaaatatggttttgtgtttgaccatgttaagtggcagagaaacatctagtttaagataattgaggtacttttactatttatttaaaatagaatagattaaatcagggttttaagctcaagatagacttatgatttcaggtattcaggtgcatatggggttgtggtataatttgccaaatctgaaatatttgataatgacatcatgtctagtaagcagaatttcaacagatttctgttgatgtcttgagtgataattcaaagcacgtggaataaatttaaaagggaacagtgaaaaattagtctttttttcttccctgtttccagctactcagttcatttcacaggcagtctctgttcccaggtttttttttttttttccctcaaagtccagaaacatacccaattattaatagatatttagtctaagataaagacagcattttatggtttttggaacacgatggaattattcagtaaacgatgtgacaaccagccagccatttaataaaaactgaagaaaaaaaattctgataggtaggaaatggaaaaactgaaagtaccataaaagtacaaaaaaatagataaaggtattatattcttgatagcaggaggacctttctgtcgtaaaatcagaaaccataatcatagatttgagtatacaagaattgaaactcctgtgcctccaaaaccaatataaacaagattaaaagacagatgacaaactaggaaaaaatttgtaaaacctgacagagggttttttgtctgatttttgggtatatatcttcatatacaaagcactcttaaaaactattaagaagtaatctctgaagacttccaatttccagtgtagcatgtaaggagctcagtaattgccacttggtcctgacaacaaataaataactgaacaaaatgaagaatagacaacacttcttagattcctcagataagtgaagtcacagggcaaaccacatcctccaaaactggagagacagacagctggatacagagaatcacaactactgaagcagaaaccgaggatcagaaacccctgagggaaccagtacccgggtaggaaaatctgagctgtaattgaggagttgctggaggctcagtgtggacaagtctgagacctaaaagctccagggagagccagtcctaaggaagcccccgtagttttgtgagatttacttcctggagctctaccaggtcctcacagtaaatatttgagaaaaatcctcttacgctgtcagctggagaagggagaagtgaaacattttgaaatacaccaaggtattctgttcttaacaaggcctgccctcaggagaaattatttctcttagaaccaaacctaactggggaatgggaaaaatgcagctccagtcaactctagccctccacatggagaaaaggaaattcctaactccacctccctctagacttccagytgtgggaagggaaataacttcagccctctccagccaccctgttccatttgaagggaggaaaaaacctgagaaatgctggtggaaggtyacagtctagaggcacgggctcaccagaggactgagacctaatcctaggcctatagaatgcttctcctcccccatcaccctagtactgcattacaaaacacctgtttactgtaggctttaaaaaaaaaaatacttagtattattatgtccacctttaacaaaaaattacaggcatactaaaaggcaaaaactgtagtttgaggagaccaaaccaaacatcagaaccatagctaaatatggcaggaatgttggaaatatcagaccagaaatttttttacgtatttttactttttttttaagcttttattttagattctggggtacatgtgtgtggtctgttacctaggtatgttgcatgatgctgaggtttggggtctgaatggtcccgtcacccaggtactgaccttagtatcccacagtttttcatcccttccaccccctccctccctcctctagtagtctccagtgtctattgttgccatcattatgtcagtgagtacccagtgtttagctcccacttataagttagggcatgcagtatttggttttctgttcctaccttaatttgcttaggataatsacctccaactccatccatgttgctgcaaaaggacatgatttcattctttgttatgtctgcatagtattccatggtgtgtgtgtgtactacattttctttatccaatcctgttgatgggcacctaggttaattccatgtgtttgctattgtgaatagtgctgtgatcaatatgtgagtgcatgtgtctttttggtacaatggtttttcttttggttgtatacctggtaatgggattgctgggtcgagtggtagttcttttaaagttctttcagaaatgtccagactgctttccacagtggctgaagtaatttacattcccatcaataatgtataaaggtttccttttctctgtagccttgccaacatctgttgttttttgactttttagtaatagccactctgactgatgtgagatgataactcattgggattttgatttgcatttctctgataattagtgatgttgagcctctttttycatgtttgttggctgcttgtatgtcttcttttgagaagtgtctgttcatgtgtttttgcccatttttaaatggggttattttattttattttattttattttatcttttgagctagagtcttgccctgccacccaggctggagtgcagtggcgcgatctcggctcactgcacgctccacctcccgggttcacgccattctcctgcctcagcctccggagaagctgggactacaggctcccgccaacacgcccggctaatttttttgtatttttagtagagacggggtttccctgtgttagccaggatggtctcgatctcctgacctcatgatccgcctgtctcggcctcccaaagtgctgggattacaggcatgagccaccgtgcccggcctaaatgggactattttttgcttcagttgtttaagttcattatcaattctggatatgaaacctttgtcagatacatggtttgtgaatactttctcccattctgtaggttgtctgttttctaacttgatagtttcttctgctatacaaaagctctttagtttaattagatctcaattgtcaatttttgtttttgttgcagttgcttttgaggacttagtcatagagtctttcccaaggtgccagtgcccagagtggtgtttcctaggttttcttctaggattcttatagtttgaggtcttacattgaagtcttaaatccatcttgagttaatttttgtatatggtaaaggtaggcatccagtttcattctcctgcaaatggcttggcagctatcccagcaccatttattgaatagggaatcctttccccattgcttatttttgttgactttgccaaagattagatggctgtaggtatgtggctttatttctaggctatgaattaaaaaaaatataggattaacatgcaaaaggctttaaaggaaaaagtagacaatatgcaagaacagatggataatgtaagcagagagatggaaattttaagaaagaataaaaaatagtaaaaaatattgtaacaaatgaagaatttcattgataggctcattagtatactggacttttaaaaatctctgagcttgaggatattacaaaaagcttccaaaactggaaagcaagaagaaaaatgacagagaaaaactccctcagaacagaatgtgcaagaactgtgagacagctgccaaaggtgcaaaatatacataaggaaataccaaagcagcagaaaaaaagaaaggaacagaagcaatattttaagtaataactgagaattcccccaaatgagtgtcagatatcaaactacagatccaggaagctcagagagcaccaaagatggtaagtgccaaaaatctacacttagccacaccatattcaaacttcagaaaatcaaaggtaaagaaaccatcttgaaagaggccagggaggaaaaataccttacctatagagaaactaagataaaaattacatccaacttctcagaaatcatgcaagcaagaagagaatagtgaaatatttagtgttgagagaaagaagcccaccacctagaattttatatcctgccatgttgtgttacccttccaaagtaaaggaagaataaagacttactcaaagtgaaaattgagggaatttgttgcaaatccgatttgtaagaaatatgtataaaagacttaaagcaaaaattgagggaatttattgcaaatctgatttgtaagaaatatgtaaaaaaaaaaagttcagagagaaggaaaataatataggtcagaagcttgaatcttaaaaacttttatattccttgttcataattgatctgacagataacagtttgttaaaataataatagtgaccatgtattcgattatgcttctgtgggtttgtatatgtgtgtgtatctatacatggtacttaggtataagtgaaatgaatgacagcaatgatgcaacagatgaaagagtgaatttaggaatatttggttattataaggtacttggactgcttatgaagtggtatagcattgtttgagagtggacttgaatgagttgtaagtgtttattgcaaactccagggaaaccgctgagagaagtaaaaattgaaaaagaagaaggggaaggagaaggaagggaaagatgagaacagttattcctcagtatacatgggcaattggttccagggctccttgagtataccaaaatcctcacttactcaagtcatgcagatggccctgttgaacttgtgtatacaaaacgttggtgctacatatatgtagttttcacatcccacaaatactgtatatatwtttttttttttgagatggagtcttgctctgtcacccaggctggagtgcagtggtgcgatctcagcactcactgcatcttctgcctccttggttcaagcaactcaattctcctgcctcagcctccggagtcactgggattacaggcgcctgccactgcgcccggctaatttttgtatttttagtagagacgggatttcagcatgttggcctggctggtctcaaactcctgacctcgtgatccaccagccttggcctcccaaagtgctgggattacagacgtgagccaccacgcctagccaaatactgtattttctatctgcttttagtaaaaagacatctgcatataagaggacccatgcagttcaaacccatgttgtttaagggtcaactgtataatcaatatgccaagaaaagggagaaaatgaaatcatataatgtgctcagttaaaaccacaaaaggcagaaaaagtgtaaaagacggaaataggaacaaagaacaggggccacacacagaaacctgtaataaatatgatagatactagtccagactatatcaataatcactgtggttaaatataccaattaaaagacagagattagtagagtgaattaaaaagcaagacccaactatatgttatcaactagaaacccactttaagtttaaagacacaaagattaaaagtaaaggaatggagaaagatatatcatgctaacattaaccaaaataaactgagggtagctatattaatagtagacttcagagcactgtacgttatcagggataaataggacgtaatgacaaagggtaagtaatcgaagaagatacaacaattcttaatatctatatgcctaacaacaaagcatcagaatatgtgaggcaaaaactgatagaactacaatgagaaatatatgaatgtactattataattggacactttaacactcctgtatcagaaattgacaactccagtagacaaaaaatcaataaagacatagttgaagttgatagcagtatcaatcaactgggtataattgacatctatagactacttcaaataacagcagattacacattcttctcaagcttacayggaacattcaccaagataaacttcattctaggccataaaacaaaccttaacaaactagagatcatgccatatctgttctcaaagcacaataaaattaaatagaaaccagtaactgaaagatagctagaaaatcccaaaatatgtggaagattaaacaacttctaaataatacatagttcaaagaaggaatctcaaaaacacttaaaaatattttgaaataaatcaaaatgaaaatacagtttatcaaaatttgtgagatgtagtgaaaccagagcttagaggggaatttattggattgaatgcatttattagaaaagatgaaagatccaaaattggccgagcgcggtggctcatgcctgtagtcccagcactttgggaggccgaggggggtggatcacgaggtcaggagattgagaccatcctggctaacatggtgaaaccctctctctactaaaaatacaaaaaattatccgggcgtggtggtgggtgcctgtagtcccagctacttgggggtgccgaggcaggagaattttgtgaacctaggaggcggagcttgcagtgagccgagatcacgccactgcactctagcctgggcgacagagtgagactccatctcaaaaaaaaaaaaagatctaaaatcagtaatctaaagttccacattaggaaacagaaaaagaacacatcaaatccaaagtaagtagaagaaaagaaatataataaaagttagagcaggaatcagtgaaatgaaaatcagtaaacacctagagaaaatcaataaaatcaaaagctggttctttaataagattagtaaaataggtaatcttttagctagaccagctaaaaagaaaggatacaaattactaatatcaaaaatgaaagagcagcatctttacagatcccattgacattaaaaagatrataaaggaatattatcactgaccctgtgcttatgaatttcataacctagatgaaatggaccagttatttgaaaggtacaatctgccaaaagtcacacaagaagaaatagacaatctgaataggcctgtatctagcaaagaagctgaatctacaattaataatcttcccaaacagaaagtaccaggtccagatgggttcactagtgagtctaccaaatatttaaggaaaaacttaagccagttattcacaatcttttccagaagacagaagtaggggaaatacatcttaattcattctgccattatcctaattcaaaaaacacatattgcaagaaaagccaagtacatactaacatctcttacaaacataatgcaaaaatcctccacaaaattagcaaatttgatccaaaaatgtatgaaaaattatataccacaaccaagtgggatttatcccaggtatgcaaggctggcttaatattggataatcagttagtgtaatctagcacattaacaggctaaagaaggaaaatcacagggttgtgtcaatagattcagaaaaagcatttgataaaatccaacactaattcattatgaagactttcagtaaattaggaagagagaggaactttcttacctgataaagaacatctaaaaaaccctacagctaatatcatagttgatgttaagaaactggaacctttcctgcaaagattaagcacaaggcaagaatgtcccctctaatcattgcttttcagcatcattctgttctagctgatgcagtaagacaaaaaatggaaataaaaggtatatagattgaaaaggaagaagtaaactgtcattgttcacagatgacaagattatgaagaaaattcaaaagaatcaagaaaattacttctggaacttgtaaaccactatcactttctcttattgccagcagtgaacaagtggaatttgaaattaaaaacacaataccatttacattagcaacccccagaatgaaatttataggtataaatctaacaaaatatatacaagatctatgtaaagaaacctacaaaactgatgaaagaaaacagaagaactaaataaatatagaagtattctatgttcatggataggaagacacagcatcatcagaatgtcagttcttcccaacttgatctatagattcaatacaatcacagtcaaaatcccactaagttactttgtggctatcaagaaactgatcctaaagtttatatggagaggcagaagatccagaacagtcaacacaatattaagggaaaagaacaaagttggagaattgacactgcccaagttcaagacttactgtaagactgcagttatcaagacagtatggcactagtgaaagaatagaccaatagatcagtggaacacaatagagcccagacacagacccttgtaaatatagtcaaatgatcgttggcaaaggaataaaggcaatacaatggaaaaaagatataatattttcaaaaaataatgttggaataacctgacattcacatgcaaaagaaatcaatcaagacacagaccttacaccaggcagattacaatccaagattgtgtctttggtgtagtatctagaaagtcattgataagacttgataagctggaatttcattaaagttaattttttttttctctgcaaaagacactgtgaagagaattaaaggacaagccacaggctgggaggaaaatatttgcaaaagatatatttgataaacgacgactacttaaaatatacaaataattcttcaacgtcaacagtaagaatataaacaacctgattaaaaaatgagctaaagaccttaacagacgcctcaccaaagaagatttgtagatggcaggtaaacacgtgaaaagatgtaccacatcatatgttgtcaggaaaatgcaaattaaaatgtgagataccaccatgtacctattagaatgcccaaaattcagaacaccgatgacacaaaatgctgactagcatatgaaacaataggaactcatccattgctggtgggaatgcaaagtggcacagccactgtttttttttttttttttttgagacagagtcttactctgttgcccaggcaggagtgcagtggtgcaatctcagctcactacaacctccaccttccgggttcaagtgattctcctgcctcagtctcccgagtagctaggattccaggcatctgccaccactcctggctaattttttgtatttttagtagagacaggctttcaccatgttggccaggctggtctcgatctcctgacttccggtgatccccccgcctcagcctcccaaagtgctgggattacaggcatgagccatcgtacccggctggcacagccacttttaaagacggtttggcagtttctaacaaaactaaacatactcttaaccatttaacccagcaatcatgcttctccgtattttcccaaatgaattgaaatatgttcacgcaaaaacctgcacgcaaatgtttatagcagctgtattcataatcaccaaaacttggaaataaccaagatgccttttagtaggtaaatgcataaatgagttaaggtacattttgacaatgaaatattagcactagaaaaaaatgagctatcaggccttgaagagacatggaggaacctgaaattcatattagtaagtgaagccaacctgaaaaggctgcacagtgtatgattatgactgcatgacatctagaaaaggcaaaaaccatggagactgtaaaaagattagccattattatgggttacaggggagagaggggtgaataatcagagaacagggtttttagggcaatgaaactattatgtacagtactataatagtgcatacatgtcattatacatatgtcaaagatggtagaatgcacaacatcaagagtgaaccctaatgttaactatggactttggttgataatactgggtcactgtaggttcattgatggtaacaaatgtaccattcttctgtgggatgttgatattggaggaggttgtgtctgtgtagggacaggcggtaaatgggaactctgtactttccactcagtttggctgtgaccctaaaacagtcttaagaaacaaattttattaaaaaataagtctcagaagaaaaaatatgcaaaggatatctgcagaaagtttacaaaagcagctaggcttttccaggtggccaggaaaatggcctggatataatcccagctaattcagaaaagtacatggtgcaagttcagaactggggcttgttcaagaagcatagtttaaaaccagaaggaattaaaaaggaattctatttgtcttcaaagagtgtattaaagggaacttaattcataaccacattaatattttttacaagttccttttctcttttccttgcttcctgctgcccaggaacttctcactggtcaaactctaaagctttcttcctaaatcccaaccaacaaggtttcttctcatcaacatttccttctttattcctttattatattgatcaacttagttccagcaaatcttcctttttaggaagggcagaatgagtagaggaggaagactgagtacactcacatgttaataaattttggcatgtcacactaagaaagtrtttttggtctcactgattattaaagaaatccagataaaaattttcttacctgccaaattagcagctattaaatagaaggatactgctgtattgttgagaatgtgtggataccagtaagttcttattggagagaagaaagactaaattttggcagggggagaaattgtacacgtttgccttctcatggatgtcaggcttcgattctgaatcccacctgtaagactttatctcaggcctgtttcaggttatgtgtgtgttgatggggggtgggtactgtggggggaggagggctatctagtatgtgtttaaaagctctatttgcatccctgtttgttttacattctcaaaagtgactctacactatttatcttgaaattgtttgtacagcctatgctcaaatcttctgtgatgcttcttgaacaaacattctcagttcctaccccagaccaactaaatcagaatctctgggtaggacccagtaatttttttaaaagcccaccataattaaatatataattagctatatggttaaataatcagagccattataacagactctaaagttgtgaacttctgctctgctatgaagcttccaatcccattcagctgaaaccctgaaaatacttgtccatctctaaaatcttgaattttcaatcatcttaccgtgaaattcctttgtgttacttagcatcctcccttctttttatgtctggttctaaggaggaacatgtatgccttgctaaaaaacactcgaggaagcttttttttttttttttttgagacggactctcctactgtcacccaggctggagtgcagtggcgcgatctcggctcacttcaagctccgcctccctggttcatgccattctcctgcctcagcctccttagtagctgggactacaggcgcccgccaccattcccagctaattttttaaaaaatatttttaatagagacggggtttcaccgtgttagccaggatggtctcgatctcctgacctcgtgatccgcctgcctaggcctcccaaagtgctggggttataggcgtgagccactgtgcccagctgaggaagcttttttaaatggagataagaccttgctgtgtcactcatgctggagtacagtggtatgatcatagctcacctcaaactcctgggctcagttgatcctgtctcagcctcccgagtagctgggactgcaggcttgtgccaccaagctcggctaacattttatttttattttttgtagagacagggtcttgttttgttgcctggggtggtgttgaactcctggcctcaagtgtgctgggattatagatgtgagccacctctgtgtctggccccctatttctattattgacctgtttcaatctgcatagcaagcagagtggcctttttagtgcacaaatgagagaacctcttaaaactccctccagtggctttccttgcacttggattaaatttcatgtttgcccacaaagccttgtgtgagctggtccctgcttgcctttccaaattcatcttattatcattatcctcctggcccactaagcttcaktcctattggcctttcttctgtttctgtaaacatrtcagcctcctttttccttagggtcgttgattctgctgttccctgcttcagaatgagcaactgtctcacctgcattggcttcttaatgctattcagattccgtggtgactccttcatttattacccaatctcacctaaccrcctaatcactcctgggtcatcctgttgcagttctctgcattgtacttaaccactggctgctgttgttgttttctgtttcctcctccaattagaatgtgagctctgttagagcaggaatgttgtctgccctgttttattgtagtagtctcagtacctatatatctcctatataacatcctctaggaatttgggtggttatctatagccagaaaagtacagaaacaagtaatgactttatacattaggtttattatactttttgtccatagggcacccataacattttatgtagtatacctcaaccaaaatcagccataacagaatgatcagtttaagggtgtcatggcagagtgtggcttgtagcagctcaagtggaatgagcaaggaagcagaatagggaaaactgcccatgaaacacaagcatgtggaccctggtggttggagatactgcttaatctatcaaaatgatccacatcccagaggaggctaggatggagactcaatgatcatactctaagcagtcaccaggagattttaggagttgaaggggcagaactacgaaagttgtcaaaggcaaattaatcaacaagtatccaggagaatctgaaagtaatgggaagaaaccagataaatgggaagaaaaattgctctggattcacagcaaagaataatgttgagtcaactttagctttttcagctcgtgctggtgagagccaatctcagtttattaggcttgcccgtaggaataaaaagcagctggtcggttgtgagtgtggtattcagagggagggagtaagggacaggagtaagggtggggcaggcacattactggtatagaaacctttagcagaaactcacatgttagatccatcatagatcatgcaggtcttttagtccattgtctcccaaacttttcatagaaaggatctcttaaattgttttttccactattaatttcacactacgaaaatgtttttgctcagaacgcttaattattaataatttgtctcccagtttttagcaaaagattctaattagggcaacatattagtatctatactgaattgacctaagttgaactaaaagcccccccaaaaacccctaaaaaacctacaattttagttagggaatttcacatttaaatgattgtttcatttagattttggaagtattaaaaatggcctgtggcctttargttgagagcttttggaacttggtcattaaaggcctaagcatatttctcaggccctttgtcttyaaatatatctttgtgtgtcacttaagggctaagcttttttacatggatcatttagctttaagactcagtttccccatctgcaaaatgggtataataatagtatctacttccaggagttattttgaagatcatttgaagcacttggcatattgggtgatacatagtatgtgctcagtaattgtyacccattattctgtttttattgctgttatctacagctgtgcagctcatgtttctcggaatagtcttgtagattttggattcaaagtttgatctttttatccgtaagaattgattccaagttagagtgagaccctgtatcaaaaaaataaaataaaaataattgattccctttcttttagctccaagaaatacagagttgaacaaagaatatattatattggcagttgtgggtggaaggagagttgaagagctggcagctggcaggttttttttttttttttttttttgagacaaagtctcgctctgtcacccaggctggagtgcagtggcgcaacttggctcactkcaagctccgcctcgcgggttcacaccatgctcctgcctcagcctcccgagtagctgggactgtagatgcccgccaccatgcccggctaatttttgtatttttattagagacgggggtttcactatgttggtcaggctggtcttgaactcctgacctcttgatccacctgcctcggcctcccaaagtgctgggattacaggcatgagccacggtgcctggccgccggcaggtttttaaagctaacattttatacaaaaaacagcttttctagtttcagtgagcacaaacaagctttaacttcagtggtaagtgggttactgatgtgcagctgctggtgatgttttaggggtaaccttacttgggagaaaggagatagaagtgaaatctgcaaactggcaaaatttgtaaaactgattctgaccttaattgtctctcatgcattccattttcttgcaacatgtttcacaataggaatcaatatagaaatgaatgtacataaataagtatatttccttggtagccatttggcatattatttcaacacaggaaggaaaatatttcccttataaattatcagtcttatttactacctttagaaaaatgataaatttggccgtattttaaataccaaaatgaagtctttaccctgtccctgcctcctttcttctcgccttctttttctttcttaggaccattatcagtttgttcataggtgatgattttgctggagaattaataaagcaatcatgtggcagaaatagtagtagtattctttttttgttttgttttgttctttttttttgagatggagactcactctgttgtccaggctggagtgcagtggcgcgaccttggctcactgcaagcaccgcctcctgggttcacaccattctcctgcctcagcctccctagtagctgggactataggcacccgccaccatgcctggctaatttttgtatttttagtagagayggggtttcacygtgttagccaggatggtctcgatctcctgacctcgtgaatcaccctcctcggcctcccaaagtgctgggattacaggcgtgagccaccgtgtctagccggtattattcttactaaaacaatttttaaaaatgtggacagaataatagagttagtacctttgaaaagtatrggggaaagggctgaaaaatgtgacacaattagcaatgaagtttttaactgtgaaataaaagcacgattaacatcagtatctttttcacagtctttttcaatgaatcactttgtcttcttcaacacctttgtagctactgtaaaatttacatgactgtgaaattccatgcctttaaaattcatataactaaagtattgtaaactctattcatagcattgaataaaatggcactaaaatgagctgataatatggacattcatgtgtcctgattcagctaccgcgtctggcaggttcaagagccagaggcctgggttcaagctgtggtcatacctcttaaggactgggaatcttgggcactttactcagtttttatgtcttcgtgtcctcatccataaaatgggaattatgaagtctatcttatatgaatgtagtagttcgtgttataattttaaagtgatatacagaggaaaaacatattatttgaaaaatgtattaactgttttatgttgtttttgttttttaaccaagctaccttctatagttaaacatacatttatctatctatccatccatccatccatccatctgtgcatccatgcatccatctgtgcatccatgcatccgtgcatccatccatccatccatccatccatccatccatccatccatccatccttccatccatccatccatccatcgagacagtcttgctctgttgcccaggctcagtggcccgatctcagctcactgcaacctctgcctcccaggtccaagcgattctcctgcctctgcctctcaagtagctgggattacaggcgtgtgccatgacttggctgatttttgtatttttagtagagacagggttttgccatgttggacaggctggtctcgaactcctgacctcaagtgatccacccaccttggcctcccaaagtgctaggattacaggcgtgagccaccatgccctgccacagttcttttttttttttttttcctttggagacagggtctcaccctgttrcccaggctggaataaggtggcatggtattggctcattgcaacctctgcttcctgggctcaagcaatcctcccatctcagcctcccaagtggctgggactacaagtgtgcacaaccacacctggccaatttttgtatttttttgtagagatggggtatcaccatgttacccaagctggtctcgaacttctgggctcaagcagttctcccgcctcggcctcccacagtgctgggattataggcatgagcgaccatgcctggccttacagttaaacatgtatttattatggactgttctaaataacacatgaattacatgccaggcctctcagtttgttatttacatttacccctagtaagaccttaaaatatgactaattcaaggctgatctacctaatatgaatatgtttaggtacaaagtagactactaagtgttagtagagttttttgaggcagtagcattataataggtaaaaatgatttataaatatcatgtaaagcattttaaagtacatagcttcacctaaaacaaaaggatttattcaataatgattttcttctgaaatattttaacgtcttctttgatattgtgtatgtttataaatttgctttttaaatatttgcataaaataaagttcagacatttgaatttataaatccttaatgaacagggcttgaggtaatgagattcaattctgaatttgttttttaattgtttgatttttctttttttcttagtatttgggtgtatagcctttcagacatggctgaaaggatacccttcagtattctctaaactgttgtttttcattatatctttgctatggggactagaatgtaaatttttttcacttgacacgaaggccatgatctacattagtatgttggtctctagtcagtcttgcctatacattttacacaagtttagaagttttgttgtctactttttagtgcatccactaaaggcaggtcaccaaaggcaaagccagactaacagctattatcagaaaagaaaatataacaagtgtgagactgtggagaaatcggaacccttgtctgcctactggtgttgggaatgcaaaatggtgcagctgctatggaaaatagtatgaaggttcctcagagaattaaaaagagaactaccatatgatccagcaatcctgcttctgagtatttatccaaaagaattgaaatcagcatcttgaagagacattagcactcctgtgttcattgcagcactattcagaataaccaagatgtggaatcaacctagatgtcccattgatgaataaaggaaatgtggtatatacatacaatggaatattatttagacttagaaaaagaaggaaatactgtcatgtatgacaacatggatgaactttgaggacactgtgtcagtgaaataagctaattacaaggtcaaatactgtatgattttagtgataagaagaatctacaataatcaaagtcatagtagcagagggtagaatggtagttcccaggggctcatgggaggtggaatttcagagagttgttgctcaatggacgtaaagattcagttatgcaagataaacaagttctagagatctgtgtaacactgtgttatagttagttaacaataacactgtactgtatacttaaacatttgttaagaaggtagatctcatattaagtggtcttaccacaataaaaaaaaaataggagtcctagaaaacttgagtgatatatctctttttagtctgtttttattcaggtttcataatttggcactacattttccaggttttttggtagggggtgtagggtcggggccccacacttttacctcattaactcctgagggccttgctatatagtaatgatatttaaagtgatgacattgtttagttaaggaaagacaaaattaaatataatttaacattcttcaggaaggttaaaaaatgttacatgttttggaagtggaaaatgtgaaagtagaagctttttttcactaggggcaaaaataaaacattttaatagtaatcagataagggattgttttcaaatatgtaaagcttatctgaagccccttgtttcttgctgatgagaatagaatattaaaggcagagaatggtcacttttacaactgtacagcatgttgataattcatcttcttatgcagactacatgatttgctcccatcctcaaacttactgccctttggtctccattctttgttttcattagatcagtgacttgctattttttagtcatgttatttacttattgaggaaaaactgtcagtatctgactcttgatttcattgctgtagtatatgctcgtgatatttttattacagagaccgtatcactctttgataggtatcttcttcatctctccatgaagtataacttcactgcacaactcatagtgattggttgctttgacatttaacaaaggtttttgcattatcttttctttgttttctgaaggatttgatttttttattccacctcatctgaaggttatgtttggaatccgttttcaagcaaaatttatctgagcttttattctgatgttttctctaaagtttgctacttgcgcctccactttcccaggtacttagggttttttagggaggtcgttactcccagtttgcaaagaaagcttgaacaactttagagcagaaaattgacttgttacttcctttacagttttcttaactttctaaaaccattcattcatagacttttaaaataatagctttattgaggcataattcacataccrtgtaattcacccaattaaagtacacagttrtatggtttttagcatgttcacagagctgtgcaaccattaccacaatttgaaattcttcatcagccctgaaagaaactgtcttttagcagtcacttcccatttccttcaacccatctggctgaggcaaacgctaatatccttctgtctctatagatttgcctgttctggacatttcatataaatggaatcatataatatgtggtcttttgtgactggcttctttcacattgcaaaaagttgtagcatttattggtacttcattttattactgaataatagtccattgtatacataaacattttatatcatcagttgatggatatttgggttgtttccactttttggctgttacgaataatgctgctrtgaacatatatgtacaaatatttgtagccatatgttttcatttcttttgggtgttttttttttaagtaaactaagattaatcaagttctaaaggaaaagaagttgggtgctacttttggaaaaaatcttctgtgaataatataacatttctctcattctctttttatcctcatgtatttttgccaggttatgctgcactaacatgttcggataacatgtacaataacaaaggtttgtttctttcatatgttacatgttataattggctggggctctgtcttacctctcttttcatccagtattcagactaaggaaacacccttctttgggacatcttgttcttattataaccaaaggaaaaagcaacagaactagtggaaacatgcatttaaagcctttgctcagaactgacatatgtcacgtttctggtcacatttcactggtctaggcaagtgatatgaccaaacctaagaattgagcagggaaatataaactgactataggtaggcactgaaaatcacatggcattaggtggggtcatatatagtcttcatttgtagaaggagacacaaatgatttgggacagaaactgaggctatcacagctcagaagaagtaatgaaacttgtggaggaaagctgaagaagactcaagtggcatggagtgaggttagtggagctccatgtctctgaattcaagggactctcccacagtctgcaaatatttagaaataaaccagagacctttggaagaagaagagagtggggaacaaggcagagatcatattatgtgtgttattgtgggggatgacttggaagaggagagctacccctaggtagtttctatatttccccaattatcttatttttttttctctttttaaaaatagttcaagttgagatcaaaataaagtctgcatagtatgctggtcttaaattttttaagtttctaaagtttcttctgtcttctcccccttctctgtcctctgttctctttctcttattttcttgtacttttttggctgaaaaaaataagttatttatcctgtagttttcctcagtcttgattttgctgattacatacctgtggtgtcatttgacatgttcttcttttcctatgtttcctacaaatgagtggttggatttagaggcttgatcatatttaggtttgaggtttttttttttttaattttttttttttttagtgcaattgcctcacaagtgatattgtgtatatccatcagaggaacataatgtctgttagtagcaattggtggtcattgcttagatccattaagggttgaaagatgttgatatccttttttaaaaatataatttcttctttaattgctaaaatattttgaaataaagaacttttcctctgctcactttttgttacactgaggtatactttaaatagtaaaggaaggataaatgcttcattctttccctttctcaattttcttcttctttttttttttttttgagttaggagttgttttttttgaggctggagtgcaatggtgcgatctcggctcactgcaacctccgcctcccacctgtctcagcctcccacgtagctgggattacaggtgcctgccaccacaccccagtaatttttgtatttttagtagagacgggggtttcaccatgttggccaggctggtctcgaactcctgacctcaggtgatctgcccgcctcggcttcccaaagtgctgggattacaggcgtgagccaccactcgcagcctatcaattttcaaactaatgaactgtttccttagagtcttccaaagttgatgaatgaattgtttttagtctttttatttttttatgaattcttgggtttaaaaaatatttgatatttcagttcgttagtctccttattgatacattggccagtgaaagtctccagattggctcctatatcttaccttagcagtctttgctagcttccttttttttttgagataatcccaggattatctcatatatgtcctgacccagacctggaatcaactgttttcacaaagaacattggttcctttgagtgagaaatggtatgtagagaccacattctttgtgcccgaggcattcattgttgcttagcttttcaatgaagaaagaagttaaaaaaaaaaaatgcgctaacactgtgcttagcacttggaggaatagatataaaacatagtcactgtctttgttaattaaagtacagcattataaatactaaattgtttgacttttgtatggaagcttataggagggtcttctcacatacagagggaagtgggacatcaaggagggcttcctcaaggtacttgacctcagctttgaggaataaagtgaaggtacttttgagaggagcctattcagatcatattgtggtatgcctttctctctgtattagtgacctgaccagtgtgagcctcagtttcctcatcaataaatttatgatatttgtcagcgtacattttgcttctctttaggtttttctctgtcagtaataatacaataacaatactgcaaggaatattactatgtgtgtacttttgtgcatttgtccatgtattttgataggacaagatttctaaaagggaaattgcttaaagagtatatatgcattaagtttttcttatggatactgccaaatcacaatcaaagaagacaatttaaaacttttactcatgattggctagtgaaatcttaaaaatattttttttacttatttattaccatgttctaatttcttcccataatataaaaagaagttaatttaaatatctttgctttctaatatacacaatatgatgacatttttaacttaaatgatatgcagcactttttgaacctagaaacttatttaataatgaagctttataactctttgctatagattaataactttccaaacttttttttttttttgagacggagtttcgtttatgttgcccaggctggagtgcagtggcgcaatctcagctcaccgcaacctctgcctcccgggttcaagtgattctcctgcctcagcttcccaagtagctgggattacaggcatgtgccaccttgcccggctaacttttgtatttttagtagagatggggtttcttcgtgttggtcaggctggtctcgatctcctgacctcaggtgatccgcccgcctcggccttccaaagtgctgggattataggcatgagccaccaggcccaactttccaaactttgaaaagtattctgagtcaggctacatagaaatcatataccctacttcctgccagctacgggaagaaaagactccatgrtttctctctctctttgtttttatttttttccttctttttaaaaaatgtgatcagagatctggattggaaagaaaacattcttagagttatttgagagctttgttattttcccagttcctttctaactttatatgagtttattccctccatttgtaaagtggctactcatctgctctgtgaaaatggctaatccctaaattaatttatgttcaaaaagagaacatttatgcttctgttttaggtgctgttgaatttattatstaataatatgtactttcaaaaattaggaattagccgggtgtggtggctcacgcctgtaattaacagatttaaaattttattataaaaatatgaattaggctgggggtggtggctcacgcctgtaatcccagcactttgggaggccaagtcaggcggttcacctgaggtcaggagtttgagactagcctagccaacatggtgaaaccctgtctctattaaaaatacaaaaattagcagggcgtggtggctgacgcctataatcgcagctactcatgaggcggaggcaggagtcatgaggcagaggcaggagaatcgcttgaaccaaggaggtggaggtttcagtgagcctagatcatgccactgcactccagcctgggcaacaagagtgaaactccatctcaaaaaaaaaaaaaaaaaaaaaaaaaaaaagaaataacagttttgttcccatctacttaaaaatagcctgtgattcttacatatatgttgatttagattgtaggaatatctttttgctatgaatacattattttgttaagtctccatactcagtgattttgcttgaattacgaatggtgttgaaaaaagataatggaaaggttaacataggagagaaacggaaagaaagaaagaaattcaggcaattgaaaatcatccttctatttctcccccttaagctaacactttcacctgatacttaccttgaagatatatgtgacagttatctagactcatatttcagttagtacctcacagctaagagtgtagactttaagttcatgttggggttattcagacaaaactgtagtgggttatttgtctgaattatgttcagttgctttgacctgcatccacactttgaacttgccactttgagattggcatattaaaaagtgtaatttgttttcttttccctttttcttatatttttagtgattatttttattaatgtgctttttaaaaataatcttttatttttattttattttattttatattgttttgagacagagcctcactctgtcagccaggctggagtgcagtgttcgcaatcttggcttactgccacctctgtctcctgggttcaggtggttctcatgcctcagagtcccgagtagctgtgactacaggcccacgccaccacgccaccacgcccagctaatttttgtatttttattagagacagggttttgtcatgttggccaggctggtcttaaacccctgacctcaagtgatccaccaaccttggcctcccaaagtgctgggattacaggcgtgagtcactgtgcctggccatttctttataatcttttaaatctttattgtaggctaaaatttttcttcccatgattaatttcatcaaactttgttcatatcagaaggaatctttttatttggagtttccgcttgactttgaaagaaaaagtgccagcctgggcaacatggtgaaacactgtctctacaaaaaatacaaaaaattatccaggcatggtggcatgggcctgtagtcccagctgcttccggggctgaggcgggaggatcccttgagcccaggaggtcgagggtgcagagagccgagatcacgctttactccagcctgggtgacaaagtctcgaaagagagagagagaaagaagaaagaaaaagttataatttactctatatgttgtttaaaggaaaagtttctctgtaaggaaaaggaatttctgctaggttgcattccccccgctctgcccctcttagtttagaatgaattctgttttgtgctgacaaatagctgtttctgaagttggcaagaaaatttcctcttgggactccactagaagtgttgtagtagctatctgattcaactgcttagaaagctctctgaaagttgccttgtttgtctggaaagagtgaggagcccaaacctgctttttccctggaggggggttgtagctataagctgttatgggaagaactaggagggattgtgtcataacagtatgaaattgagcaataccaaggcataattaaaatttcatactccaaagcaaattttcagacacaataaagaagggctcttaaagataggcttgggtagtattttatactcttatccaccttcttaggagatagaaaggaaagaggaggaagattttccttttcttcattttctttttatttaaaacagtccacaagtaagctgactgccttatgcgagtcattatgcaagaaaggaagggggatcaagagttactggtgcagattccatcttactataaaataaaattgtgggtctttatgtaatatcttattgaatactaattgttttatattaaaatattacatgtaaatattaagataccccatgaaattattttgaatcagatcaagtggcaaggagaaaagagtcagtagttaagaataactgggggagggggtgatgaaaaagaaaagttataatagtaaaatgagatgagraaggtaatagaaaagttggaagcagagaagttaagtaaaataactatttctgttttctccatctgccatcttcattctttgccaacttttaggccaccttgaagagattaccttgattatcttgcccacacactaaattgtgtgaccacagggcaagatacaacaattygtcatctcagttttcttatttctaaggttagtaaactagtacttagcacatagagttgttgcatggattaaatgagctatctatagattgctcattagcgtgcttcgtgcatggtaggtgctcagtaaatgttaactgttatttttgtcatcactattgttattaatgcctcctttatttattcatgcattcaacagatgtttattgaatgcttatattggaagttggtgattaaacaaaacaaagttcctgcccttcttgagtccctgccctcaagaagctttcattcactcttgtgaacaagacagttaataagcaagcaaataaataattaggctgggtgcggtggctcacgcctgtaatcccagcactttgggaagccgaggtgggtggatcacgaggtcaacagattgagaccagcctgaacaacatggygaaaccccgtctctattaaaaatacaaaaataagctgggcatggtggcgcgtatctgtagtcccagctacttgtcaggctgaggcagaagaatcatttgaacctaggaggcggaggttgcggggagccaagattgcaccactgcactccagcctggcaatagagtgagactttgtctcaaaaaaaaaaataaataaataaataattatagattgtgctaagtgctgtgaaggaaataaatagagggacaagaaagaaagaataactgaggagtcactttctgtgagggtgtccatgaagggcttcatgaagaggtggcagttgagctgaggcctaaaaattgagaatgagctcagtaggtcaagagtctgggaaagtgcattcccataaaggaagcagcatgtgcaaggctcaggttggagacagcttgtacatctgaggtgtagaacagtggtccccagcctttttggcaccaggggccagtttcatggaagacaatgtttccaaggactggggtgggtgaatagttttgggatgaaactcttccaccccagatcatcaggcattagattctcataaggaacatgcaacctagatccttcgtgtgctcagttcacagtgtcctcctgtgagaatctaatgcagctgctgatttgacaggaggcagagctcaggctagataatgcgccctcacaggcagctcacctcctgctttgcagcccagttcctaacaagccatggactggtactggtccatggtccgggggatggggacccctggtatagaacctggaaaagtgggccagacccagtggctcacgcctgtaatcccagcactttgggagactgaggtgggtgaatcacttgaggttagaagttcaagaccagcctggccaatatggtgaaatatgtctctattaaaaatataaaaattagccaggtgtggtagtgcatgcctgtaatcccagtgttgaatctcttcactcattccttttagacccccatccaacagttactcctcttgcttgcagtacttttccttgagatttttctgaaagcataatgcgtcctttagttacagtttcagctccactcctttcagccagtactcggtgaaagagtggaagaagctttctaaacacttgacctgccatgactcctgctgctgtagcttatactcatattatttatttatttatttatttatttttgagacagagtttcactcattttgcccaggctgcagtgcggtagtgcgatctcggctcactgcaacctctgcctcctgggttcaagtgattctcctgccttagcctcctgagtagctgagattacaggcgcccgccaccatgcccagctaatttttgtacttttagtagagacagggtatcgccattttggccaggcaggtctcaaactcctgacctcaggtgatccgcctgcctcagcctcccaaagtgctgggattacaggcgtgagccactgcgcccggcctcattttttactttttaaatgactagcaacacagtaggtttgtttaccccagcaccaccacaaacatatgagtaatgtgttttgctaggatgtaatgccagctatgacatcatgaggtgataggaatttttcagctccagcataatcttatgggaccatcgtcctatatgccatctgtcattgaccaaaaaatgtcatgtgacacatgactgtgataaggatatatctcaatgaatttttaaaaactgaacacactcatataaacagcacccagaataagaaacagcacattaccagcaccctcaggctcctctcaacacccactgcaggttatcaatttcccttagcaaaattaggctgttttatgccayactataacatatcttcagttgccaaataatgggaaagatagagttaatctcagcttactcgtatataagtcatataaaacactatttttattttctctttattgctgtctttttaattaaatggatataatgagtgctgagagcatgtccctgctgtgtagtgtcagtagtgttatctttaaatatagtacagtttttttttttaacattcattttcaactcattttgaaaagaacctgggcttaatggtttttcaagaaacgttaggaaagccttgttgatttttctttttctctaatgtatgttttatattttacctaagaaaaagaagcaccatatttttttcccacactggtcttaatctaagaaaggtagctttagaacattgatattttaaaaatatttacaaatactattttcccagttgtagggaggctccacatggttaaagtcttctggtctgatggatcaccactttgtttgaaataagggcacatattaggagggccttcctttgaagtagaggtatttgcatacataaatctatgccgtgactataaagtactgaggctgtgtgtactttgtgtgcaaacagatgtctgtaaacatatgggccagtctcttctcccaccccatttttttgtaagtcatggctcctgcgttttggttcagaaagtgtgaatttggagattcactcattctggggtgaatcccagctctgtcatccacatcgtatgaccatatacacttaactttcacctctctgtgtcgcagtgtcttcatttatgaaattggaataatatacctttcttagaagtattacatgaggaataaatgaaataacaaatgtgaactagcatcctggttggttcatacaacttcacagtaaacgatagkttcttctctgtcactcagagttgaaaactgcaaagtctatcacattattcccgatgaatgtagtaatgtcctaagagtgatcactcattgatgacatgtcagccatttgaacatttcaaacacagaggccactttgtccccctcattgatctgtcaggcctctcacatactaaatctttgccttacccaccttcgtggtctatcaccttaactctgatcagtgtcttttaactttcttgtccctttgtcttcccattgatgtgcctaggaaatctgccaacctggatcagtcagtgtttctcagcatcagcactattgacattttggatccaaataattctttgttctagagtgctgtccttggcattataggatgtttagcagcatcctagcctctatccactgcatgccagtagcaactcttttcctgcagattgtgacaaacaaaattgtttccagacattgccaaatgtcccaaggggagaaaattgttcaccccagccctcctgtgttgagaatcactgtctatatgctttacttgccccttcatctttggtcctgatgaaaaatgacacaggtcattgtcactmtaaatccatattttgtaatttcaactgggtccttaattttgcctggtagtcctttaatacttcctagtccattctcccatttttcatggggctattttagatctcctttattctcttcagacttcctatatcataccttcctcttattcttaacagatgaccttgtcttcttttcaaacagaaagtaaaatagaagctattatctttgtcctccttcaattttgtgatgccaaccatgaacttacctaaatctgagttctggcttcagcatttagcaaatgttgtgacctttggcaagttagcttttaagcctcactttattcatccgtatcattactgttaatgatagaaatcatgtaaggtacttagtgtagcgccttggccatagtgtctgatgatgataaggggtagggaatgccacaggtgtggaaggtggtgctattttatgtaaagtgctcagagagccccattttagggtaatattagagtagatttctgaggaaagtgaggagtaagccatgcagagttatttggagttatttggagaaagtcatgcagttcacttttcaagaaatgtactgtaagttaagagacagaatggtaactgcagggtgatatgcagttaagggagtgggtgggtttgttgtttttttagatgagagagatataaacatttttaattgcccatagtaaggtaccattagaggaggaaggattaaagttacaggaagagataaattaagcttatttcaatagactgaattatttctatccattttccgtgccacaggtagattagttattctaaatgctgattcctttgcttccttgcttaaagtccttaaatgccttcagtttcctttagtctaaaatacagcttcacaaagtgctttttaccaggtcatggtcagttggtccctgctaacatatccaccttcagctctcagcactcgctctatccatgcttcttctgtctcccaatctcccctgcccctgctgtcccttaaacgtgctaagcttcagtcatactctaatgaatttctcaaacttcctcacatgtggcatgctctctcaagttttctgttttttgtttttttttttttttttttttttttttttttacaattgcttgaagccctttactttccccttctccacgtctttggctgactttcattcattcttcaggcyttgtcacgtctatcacttattttctgactacttccctgaccccaatcctggattagttgccccttctgtgtgctgccatccatccatttaatatcttctgttggacttctcactttgtgatactaaattatataggccgttttatttgtcttgtccctactgtgctgtcaacttggtgggaacagaggccatatatgtcctgttcacttttggatccctgtacaaggcaacagtacctggcatacagtaggccctttgcaagtatttactaagtaagttaatagatttaattgctggttagataaaggaaaatattagttcattcatatagcactgttatttaaaattaccctgtgctggatgttgtgccaaaggtccccaggcactgctttcaaatcccagtcctggaaatgaaacatgcacagtgatgcttttccaaatatgagttctcctaactcaaaatggagtaaatttggatttatttttaatacctctttgttaattttgagaattttatttctaggatacgatgtcactcattattctacatcaaactgtcacacatgcttagaaaaaaagaaacaaagcattgaaggggagaggggatcttttctctttcttttcttttttttctccctgctgctgttttgtctgaataaagacttgtgaggtagaaatggagactgtaagaaaggcttgcattctctgagcacaacctgatagcaaggggattttgaaagaataggtatagaaagaggagagcacagtaagtatttcaggaagagccatagatactctcatctgtgttttaaaagtttttctagtagcgtttcatttcaaaaacagacaaacaaaaagcaatgaacacttagcatttactctgcacttatatgcctggcactgtgctagttgttttgaattttttatttaatcattttaaatatttaattaaatttataatttaatttataaataaattatttattttaatctttatgaggctagtgttgttaccatccctttagtgggtttacatctatttctggatttcttttttttttaaacccataatgccaaatcctaattcactcctccagtgaattaggggaggggagagcagcatgaaccctagcttgctctagtgtcctttggagcctctagggccttgcagtagtggaatcgggaaaactgaggaaaggtgagtgtttccttccttccttttattccccccctctattttctatttgagtctggccattgtcagaaatatgtcattaatatctcataatcaaagctcaatagaaattaaatgtacagtacttattataatcaattttagatagatatataaattggcatggatagtgccaattttttttaagttaagagacagtaaaacatctattcttgcctttttttttaagttaagagacagtaaaagtagggttgtcactgcttttattggtttgatcatcaagatcttatgttttcaactccatttttttaacaaaatctcaagttcaactacaaattatcctatcacaaaggccactattgaagttcaaataagtgctgtgcttgctctgaagtgggagggtataaatagcgtgaaaagggatatatttggaaaagttacatacactagaagttacatactgaaaattattcaatgaggaaagcagtatgatctcaaaaaatacgaagtccattatgagtttttgaaatggtggttcttaggatcattctggtgttgtgaatttttttatttttatctgtctgtcttatctatctatcttatctatctatctatctatccatccatccatccatccatccatccatccatccatccatccatcccaaggtgctgggattacaggagtgagccaccatgcccagctagtgaatataaacactgcctttggaagcttgcaatccagtcctggttctgtcacttcctatcactgtgaagtcatgttcataacttaggcatgttattctttcttagcttcagtttcctcacctgaaaaagtagagataatatgtattcagattattgttaggactaaatgatataattcatgctaaatgcttattagaggcttagtagttatgacatgctgagaagtattagtgcatttactgaagtactgtgctagtgattggcaacataatgtgtctggtttaagatattaaaatttttaawcctaatgaagaaaggacaaattaaaaatgaatcacagttaaaatgtatacatacattattgagaaatgaattacattattttgggttctgcagagaatcaggtaagtataaaatagatgccagcagcaatatcatttgcaagtataatcaagatactaaaatgcatttggggaagataatccatctttttgtgaagttttcaaaaaatggcaaaagggggagggatgggagaaagttggttgttattataatgctactttgttataaacaaaaattttctcacaaagtagagcaattgtcatttgacaatgtctggagacacatttggttgtcacatggagggtgagagttggggaggtaggtactgctgaaatctaatgcgcagaggcaggggtgctgctcagcttcctaaaatgcacagaggatagcctccccctccaaaacttatgtttcctaaaatgttactagtgcgaaggctaagactttctgatctagacttatgcaaccgctcacttggaaactaatgttatggtatgttttgtggtaaatactttgtagaaatgtctggattgttttaatctatcatactttatctgtaactgacaatggtgttttatcctcttgaaattctattggttttcatggaggaactaaaattagtaaatttctcagataattacttgttttcatgatgaataatgaacaatccagttgaccaattttaaagactattttgattgacatatagttactttacattagattttatagttataatttgagatgagttcctttatgatgataattatttagactagagttatttggagatttttcaaaatggtcatgattgattagattaaccatacatagtaattacagatttaatttttcaaaaattaggaagcatttcattgatttcttaaaaaagcaaacgggctgttactgacctttcttagcaatagttaattgagtgcttcctttgctcaactatgttctatgcatatattatgtgttcattatgtgatccccacgcacagcagcttctttatataggaattattcccatttcatagataagaaagcacagagagatcaagtgatttgcatggtaacacagctagtaaatggtggagctaggattagaagtcaggcaatgtagctcaagtttggggtctctctctctctyttttttttcttttttttgagatgaagtcttgctctatcacccaggctggagtgcagtggcgcgatgtcagctcactgctaccttggcctcctgagttcaagcgattctcctgcctcagcctcctgagtagctaggactacaggtgtatgccactgtgtccagctaagttttgtatttttagtacagactaggtttcgccatgttgtccaggctggtcytgaactcctgacttcaggtgatccgcctgcctcagcttcccaaagtgctgggattacaggtgtcagccaccatgcctggctcatttgctgtcttaaccacaatattattaaaatattatactgacatttaaccaagaatgtttaagtactttctgattatttacttgtctctagaacacatcagtgaatagttaagtccttaatgtcttggtaagttcttggaaacgtctacttaaaaagtgaaacaatgtataatgaaaccaatttttttttcctcatcaatgtcgtaaggaaatgaggttgattgaaacaactttggagaaccttctgtactcctttcatttagttgcggtttccaagaacctatccacaacattaagtgggkacttactatatagccaaaaataaaatgaaaggcatataattttgaaatgtacttgtagctttggaatgyactgtacagtgagttcgtcatacatctagatgaggatgtaaaagaacaaaaacttggaatttccctccctctccatgcagctttgaagagtctttaatccaagggaaacctacagttctttctctgccgtaggttctcttctcctctcttccacttcctccagctcctgtttgtctcttcctccctgtgtgtcttactaccttgttttgggggtttgttttctctcctgatttttacctctttcagtcctcaaaatggtctgaataaactggagattaatttatttttgaaagaagtgtttgtatctactaagtgaggttatggaagagatccaaaaatgttctgggtggcaggagaagacatttaaaatacacagttaataagccacatttagataatctataattgactgtagtttattcagaaatgtcttttgttaaataaagcttctaagtgaagtctcaaagccacagaattaagaaaggctgtttgtttagtcaatgtgattactgctcatatttttaaaaggaaaaaaaagcaaaaaaaaaaatcagtttttcataaaaggaaatgtgtccactattttaaagatataaatattctgtctagtagatatggtatctgcaataaatgtgtttgtacatattgtcatattctgttaatatcaccgtaatttccaagtgaactttaaaaaactataagggatcaattatttttcaaatctgaaaattttatctaaagtttaaaaactatttcattctacagctatttatcagctaaagaagagaacttcatttattagcagtacctataatacaaggaaatcctatttagttcctgaagaaaaatacttatagtttctcagcaggtagaagttgaatttagtaaaaacatttgaggattcagtctatgatatgattagcctaattttataatgtcaacacatgagtggcatttgtaaaatttacaaataatgatacttagttctgatgagtctataatgtggttatgttaaacataatttctcttacatataaatatgaattatatggtaggcgatgaaaatgcttaccatttcttctccagaaagttaatatcctgtgatatagaatgaaagtaaggaaaggactgttgttggtagtcacaaaaaggaactttttcttcctttgtagttatagccagagtcctgggctttctcatttgccatttccattttttttttaactgagtgatataacagcaatgtagcaaaaataagtttgcatccacagtgctttctgtcagaaatggtgcctctatctataggcattcaaactggctgtgatgaataatagtttttttttttttttacaatagtacttttaaattgtcaataacatccactgaaggaagctttaaatgcgttggtcctgtaaccattgtgctcacagctttcattgctgccattctagggtgccagtccctggagttgtgttggctttataaaactatagtttaggccaggtgtggtgtgtcattcttatgatcccagtgctttgcgaggccagtgtgggaggatcacctgagccaaggagttcgaagtacagtgagctatgattgtaccactgcactcaagcctgggtagcaaaatgagactgcctcaaaaaaaaaaaaaaatsaaactatagtttaggctgtttctggaggattcattagtgctcccatcgaatgtatttaggagacccgcacagggttgcaaaagatgggctttgtaggtcatttgcatcttggtgaaatgggaccctttccaacaggatcaaaaccttttatattggccacagaacattgttgtctcatttgacaaactctggactacaactaactatatagtgtaattctttaaagatttaaaaaaattgtcaaagtaatagatattcattcttttttgtaatggtattctagagtaccatatttagaaaatcagaaaactggaacaaattaaaaaatatatatttggcaaatctatcacccaaagaaatccactgataatatttagtcttctcaaaaatctcttccctgtttttggttactgggatcattattgtctgaatctttcaaagtagaaatctgggtctcatatgtcattaaatttaagaagttctgctatttctgtgtcactctcagtgggacaacaagacattatgtgtgtcctartgtaatggattaggaaagtacatgtatcacctatggactattatggactatttttgccaaaaaattgaaactgaatcatgtctctagatctagatcttactaccactttacaggaaatatggggaatagaatagtaaattaataccatgagggaacagttagctgaatttaggatatgggaaattctccaggacaaatgacttaaatgagattaaatgagatttaaagagacttatcaatcagatgcaatgtgtggttcttgttttgtttctggtttacacaaactaatggcaaaaatttcatttttgaggtaattgaggacatttgagtatggactacttattagatgatactgaagaattattgcttattttgtaaaatgtgataatggtattgtagggttactttaaagaaaagtctttaatggataatgatactttctttactattcctgggtgagatgatacgacatctgggatttgctttaaaacattccagccaaaaaaaaaaaaaaagagaagaaataagattggcaatttgttggtattgttgcatgaagggtatgtgggtattcattcttctttttctctctctcattaagtttgaaaatttttgaaacaaaaagctgaaaaaattatataatacgtaaaaagtgtatagcataaaatgttctaacagcctacatagaaagaaaattgggtcagtgatataattcagtgtctatatgataaaaacaaaacacctgctagggaatagaacaattcttgcttatattaagaccaaaaagttttctttattagtggtttttgttcatttgtttttgagacagggtctcattctgttggaggttggagtgcagtggcaggatccatagctcgctgtaaccttgaacacttgggctcaagtgatcctccagcctcagcttcacaactagctaggactgtaggtatgcaccatgtggttatcagcttgacctctggggggtctggagactaaggtcagccatgcaaatagccccagtaaaaaccctaaatactaagcctcaggtgagcttcccggttgccagtatttcctgcatgttgtgcatatgttgttgctgggagaaataagccctgcctgcatgactacaccgggagaggacaactggaagcttgtgcttgctgtctcctatgcccctcttccctttgctgattttaatgttgtcattttagtgtaattaacagtaagcaaaagtataatgtttcttttgagttttatgagtctctctagtgagttctgagggtggttttgaggattcgccaaacgcagagcttcatccatatctatattgttgcatgtataatatttcatttattgttgagtagcactccatagtttgcctgtttcccatttgagggacatttttggttgtttgcagtgtttggcaattacaaataaagcggctatgtacatttgggtgtagaggtaggtttttttatgaacataggtttttatttcacttgggtaaatacctaaaagtgggattgctgggtcatatgaaaagtatatgtttaactttattagaaactcttttgcaaagtggcagtcacttccagtcagcactgtatgagagttctgattgttcctcatcttcctttactgggtcatatgaaaagtatacgtttaactttattagaaactcttttgcaaagtggcaatcacttccagtcagcactgtatgagagttctgattgttccttatcttcctttacacttggtatctcattgtggttttaatttgcatttccctgataattaatgatgttgagtgtcttttcttgtgcttatttgccacttgcatatcttatttggtgatgtatttgttgaaatattttgcccaatttttaaaaatttgttttttttattattgagttttgaaagttctttaaatattctagatattaatcctctatcagatatgcattttgccaatattttacctcaccctgtgacctttggagagcagaagtttttaattttaactatgtttaatttttagttttatgaatcttgcttttggtgttgcaggtgagaaatttttgcctatcccagtgtcacaaaatgtttcctcctgttttcttctgaaagttttttagctttatattttacgttgagatctatgctccattttaagttagtttcagtatatgctgcaaagtatgggtcaaggttcgttgttttttttttttttttgacatatggatgacaaattgttccggcaccatttgttgaagagatcatcctttctctgttgaattgcatttttacctttattgaaaaatcaattgaccatataagtatgggtctatttctggactctcttattttgttctgttcatctatgtatatctatctttttgccaacattatggtgagttgattactgcagctatatagtaagacttaatataagatagcatattttatataaagagtcttccaattttttcattctgaaattgttttggctgttccagtttcttcatcttaacttatttgggtttagaatcaacttgtcggtgtcaaaaaaaaaattaataccatcattttgattgggattgctttaaatttgcagatcaatttggagagaattagaatcttattgagtcttattagaatattattaatactgatgcatggacatggtatatctctccacttatttagatcttcagtctatatctttttgagagaggtctacagtttgtgtctcttagcaatttctgtttcatgtaaattgatgaattttttgtataaagttttttatactttctcttttatccttctaatatttgtagaatctgtagtgatgtcacccctctcattccttttagtttgcatattttcccctcttccttgtctagagatttctttctgcagctttgatctgctggcctcaagtggtcctcttgcctcaccctcccaaagtgctgggattacaggtgtgagccaccatgcctggtcttttaaaaaatgtttttaatttaattttaaaattttgtttgtctacttattttagaaacaaggttttgctctgtcatccaggctggagtgcagtggtgtgatcatgactcactgcagcgttgatcttctggacataagcaatcctcttgcctcagcctccctcccaagtagcttgggctgcatgtgcacaccaccaggcctggctaatttttaaaaattttttgtggagacagggtctcactgtgttgcccaggctggtcttgaactcttggcctcagctgatcctcttgtctcccaaaatgtggggattacaggtatgagctactctgtccagcctataatttttgattgaatgccagtcatcattttatggtaaatcgtatttatgctgagaatttgtcatgactcttgttctgctaaggtgttagcgtggagggttgaattagtcttgcttggagttgatgagaatttgccttttattgctctgattaccttcagtgcattatcaactttatatatataattatttatatatatataataaataaatatatgtatatatttgtttatttttagacaaaatctcattctgtcgcccaggctggagtgcggtggtgcaatctcggctcactgcaacctcttcctcccaggctcaaggaattctcctgcctcagcctctcgagtagctgggattacaggcacctgccaccatgactggctaattttttgtatttttagtagatacagggtttcaccatgttggccaggctggtctcaaattcctgaccttaaatgatccacccacttcagcctcccaaagtgctgggattacaggtgtgagccactgctaccagcccattatcaactttaaatctattatcacctagtacttaagatggggattgatttgctgcaaagttttgaccaatgtttttacttcatgtttacctgttagccttatctgcgcacctgaacttcagagagggtctctctctgttcttttgctacttctctagtagtcgaatgctcttacttaggtgttacttggagctagtttgtgttgttgtggtgggcatggggccttggatgctgtttagctttgtggtggtaggaattgagctttctcttttgttctagaccagtattagtcttaggcaggctctgttttcctctattcttgataatcctccttctccccagtagtaggagacctctattgttttggtcttaggttactttcttgtctgtccttcagaagtacatacagtatcatctaattttgcaggaatttattaggaagtgttttcacatcctgtattaaaaggaatatatttggaagccatttttgacaagtacccgaactttttaaggtagcgctaactattttcatggaattagatcttccttactaagtaaaacatagttttcagtggtgataatgtagaccaaattgaaggctatttctattccctctaggaagtatgtattcagatggattatttttttaaaagcataaaacaaaattgtaaaatggggagtatccttagctgtccagggttcataaatgcagtcctaatcgaactgagcatttgagagagacataatgactctacatatgttgcaagtaataatgatgtaattatttattataactgtaaaggaaaggataattatgtttagaatcatgaacatctgcaaattttcatgatttatctttacattttatactcgcttaaccatcactatatgatgaagatatagggcatttccagcaccttcatgccacttcacagtcaatactacccacccccatgggtaagcactattccaacttctatcagcattcattagatttgctgtaatttgttcatttaacaatttgtcacattttccgtattacattattactcattcttttttttttttaataatttgagagtaggctgactggactacataatttggaacttttgaccccattaccttcagtcttctctttgattttattttgctctgtttaacaaattgttytgggctgagcacggtggctcatgcctgcagtcccagcactttgggaggctaaggtgagaggattgcgtaacgccagaatttgagacaagcctagcaaaatagtgagaccgtcgtctctacaaaaaaataaaaaatgagctggacgtggtggtacatgccggtggtcccagctacttgggaggctgaggcaggaggattgcttgagcccgggaggtgggtcaaggctgcagtgagccatgattgtaccactgcactccagcatgggtgacaagagtgagaccctgtctcaaaaaaaaacaaaaaaaaaaggtgtttttatttctatttcatccccatcctttgataaattttcttcaggattcaagtatgtatctctctcatcctaaaacacttttcttcacggctgcccgctttataagcactcttacactcccactcattttagcgattgaggagagactcagcaatcagttgaccaaagcatctaacatactttttccatatttctatatccttagtctgttcactgagggtgatttccaaggagtcgaattactgagtcaaatggtatgatttgtttaaggctgttatcagtaaagatggtcagattgcttcccagaagttatttatttatttatttatttattattattattttttttagtgtaccaagtgtgtatttatttctttttttcttttcttttttttgagacagagtttcactcttgtcacctaggctggagtgcaatagcgcaatctcggctcactgcaacgttcgcctcccgggatctagggattctcctgtctcagcctcctgagtagctgggattacaggtgcccatcaccatgcccaactaatttttgtatttttagtagagacgaggtttcaccatgttggccaggctggtctcaaactcctgacctcaggtgatccgcccgccttggcctcccaaagtgctggaattacaggtgtgagccactgtgcctggccccaagtatgtatttcagtttactttatgcaatttaacaaaaatttagtcataatttaccagatatacataaatgatttaagtagcgaaagaaaattcagctttacaacaataagttcatatcttgaggaaaagtaaaagtacattaagaatgtaaaggcaagtccagtttcgatgcaataagtgamctgtaattcctagaagttctttttacctggccaggcacagtggctcatgcctgaaatcccagcactttgggaggccaaggtgggaggatcacttgaggtcaggagttcgagactagcctggccaacatagtgaaaccccgtctctactcaaaaatgcaaaaattagccaggtgtggtgctgtgtgcctgtaatcccagctactcaggaggctgaggcaggagaactgcttgaacttccgaggcagaggttgcagtgagccaagattgtgccactgcactccagcctggatgacagagtgagaccgtgtctcaaaaaaaaaagtttttttaaccaaatgtgtattacttctacaacagagcatttgttttaccatatccttgtcctacttaatgtttttttcatctttattagttttatagaaagtattatatctctattctgtaggtcttttgtaattaagggatacattaacagatttaaaatttgaattaggctgggggcagtggcttacgcccgtaatcccagcactttgggaggccgaggagggcagatcatgaggtcaagagatcgagaccatcctggccaacatgatgagaccctgtctctactaaaaatacaaaaattagctgggcgtggtggcgctcgcctgtagtcccacctactcgggaggctgaggcaggagaattgcttgaacctgagagaaggcggttgcggtgatcctatgatcgcgccactgcactccagcctggcaacagagcaagactccatctcaaaaataaataaataaataaaaaytgaattataaaattcctaaaagaaaataccaaagaatacctacatagagtatttttaaagcatgccttaaggctgcaacataaatatattagcatatttggctatatatgaaattttaaaacttgtgaatataaaaagaaattgcagggcggggcgcagtggctcatgcctgcaatcccagcactttgggaggcagaggcaggtggatcacttgaggtcaggagttagagaccagcctggccaacacagtgaaaccccgtctctactaaaaatacaaaaattagccaggcgtggtggcacatgcctttaattccagctacttgggagactgaggcacgagaattgcttgaactcaggaggtggaggttgcagtagctgagattacgccgttgcactccaacctgggcaacagggagactctgactcaaaaaaataaataattaaataaaaaagaaattgcaagtgggggaaagaagcatccatgcaaatttagatataaaagcaaatgaagcaattgcttttaagataatttttgtagctagaatagttgaaattattaagaaattattatatataatatataatagttgagataggatttttatctattatagatgaagaaggtatataaggttaaaaagtgtcaattcaaaagtttatttgtaatgtagaacattgcaaaaattcttccatttcaagttagttttgatagactgtttgtttgtttgtttgtttgttttgagactgagtctcactctgtcgcccaggcttcagtgcagtggtgcaatctcagcccactgaagtctcttgcttcccgcgttcaagtgattcccctcccttagcctcccgagtagttggcactacagccatgtgccaccatgcccagctaatttttgtatttttagtagagaaggcattttactgtattggtcaggctgatctcaaattcccgacctcaggtgatccgccccactcagcctcccagtgtgctgggattacaggtgagagctaccatgcctgacctatttgttttaatataatggttttatgaccaaacttggaaagcagaggaaagaagcagttttacaatgatgtttaaaaactgttatttagtactttggtttgtattatattagtatgtattaatattagtaattagtatgtagtaatattagtattaatcatatgtatatcttctttgagacctttgagaaatagcatatgctgaagtctttctaacaatatttgttttgctaagcaagattacttttgtcagtcctttaacattttgggggtttgaacctaccacgtgacaggaaagcatactttgctccttgctgaattacgtgtgttcttgattataaatttccttcattatataatacctagcttcattggtgaggaagaacatagatggagtatatggttagcatgcagagattttgagttggtattactttttagtttagattttacattggctttccttcatttatagttttaatacaagtttagaacctcctttacttaatgaactttcatggatataaacagaagacttttaccctgctgctattaacttgtaacaatagtgaaagcttgtaagattaataagaacacgacccttttggaacctaacctgtttgcaaagtgcagacttgcatattttaatggtagttaatagttggagcgtttatgatagggatgatgaacagagaaaaagtgcagtgggacacgctggcaagactcttactgtgtgctcaatggcaactttccatttctttatttcttgtagttcctcactcagcagattaggaattttctgatgctttgtgtattctttctaaatttttaattttttatcattaaaaatcaaccttgtttttaatagagaagagaatgttgaaaagaagtggtacattcctgtgcagccagaatttaaactggaaactggataacagatggatagaaagtacaattagaaggcccaatagagattgcttcacttcctccttcatttcttttctatcttcctttttttcttctctttccctccttccatggcatcaagaagatagtcagaaagttatgtttgtatattggctccatcaaggatgttatttgagactgttctttttagaagactaagaatagactagtgttttggatatacactcataggatcatttttgggtttgtattaaattggtagtttggtaatgaaatgaatgttttttcttgagaattgtaactcttccttctgtatctgttctttagaaattttcccaggaaaaaccttgcttttctactgaagcatgttttcgaaggcttaacattgtacctccatgatgaaaagagataatgtacataagacattattttgaaggtgatgaataaccctgtaggaagaacaggaactctcatttatgtccgagattctaagttcctcttagttgagttagatttagaaaaaggtacattttgctatattcattcattcattcattcatgctataacatgttttatcatctcttagcaaggcctggtagctgctgggagtatagttatgaacaagacaaagatgccttatggagcttatatatcctataaagggaaaaaatataaatgatcaattacacaataaatggtgtaaatacagttgtggtagtactaagacaaataaggcatgttttgaaaatctgttattggggaatcctacatagtctgagaatcagggatggtttccttgaggaagtgatattttgatatttgagttaatttatcattatcataaatgtgattgaggaattcattttaaataagtgcttagggtatacaaaccccaaatacaaattatttaaggtttaataaaaaaatggtaacataaatttatattccatttattcttggtcttccacttgcataattcagttgaaactcttggtttccctcatttaaatagtggcttgcacgattcttagccctatctatatatataatctaagacttcataaacgcagtccattatttacatttgacaattaataaaagccttcaagttataataggtttgaaaaatatttgttaaaatgcattaaatttggatgaaattctattgatagttccttaattaaataaaccaaagcatttctattgtctatctttccagatagactgtgagcttctcaaggataaaggtcctatctccagaaccttgcaggatgtgacccacatagtaagtgctaaataaatactgaacacagcaattatgagtaaactgtaaataaggatgaaacaacttgataactgaccttcacgtttcttttaagtgactttttagtataatagttaatagcagggagcctttgttatcacaagatctggttttgaaaaccagtttcttaatgtgtattcttasgcaagttactaaacttctctaaacctcattttctttatcctcaaaatgagattacgtgtgtaaagtacttagtatactgtctgacacatagtaagtgttctataagtggtggctaaaaagatgtgttaaactttttgtctgtgttagataatatctgtgatatttaaagtagacatgtatagtgacataaaatattagtatgtatgagagcagatgattgacactttccacagttacataccaagtcaaaaagtgaaaaatctataactactaggcttttgcttattcagactaaactaagtagataattatggttcttattgcagtgaatacattttcttcctttataagtcagttttttaaaaaaacaaaatagtttgtgggttttttttgtattttaaaaatgttttttagagacagggtcttgtgatgttgcccagcctgaacagaagtcctgggctcaagagatcctccagttgcagcctccagagaagctgggacaacagacacatgccatcatccagcccaagctgtttttatgaataaatttttgtgaacttctaaaaagggaaaaaatcaaataatctcccagtctttggtgtagattaagatatttgatgtaggaggtttgcttgaattgatgtgtgcataggcatatttaatggacatatttacacgtggggatggaaagactagaaaatctaatttatatgtctaattttcagcttctataagtaaacttagttattttaagtaattcactgtcattctttttacctgtataatgaaaacaaataccattactcttctgtttccgagtatctttatggaagtaaagaatgtaaggaaacaagttaagaaacaaatattctgaagtttcaaaaccaacttgaaaaattttttaaattccttgttatttacaaagttatgatttgctggcaaaaataaaataataaaaataccccttaatacaaaacgaagcaaaaaatgccagcaaacaaacaaaaaatctttaaggactttttattctacatttaaaaaaatgtacttttaaatttttccaacagcaaaatatccacaaattagtgtaaactctaggcattggctgtagtcaagggattagtagaagagaatttggaccagagttctaagaatattaagatacttgattaaaaatattttggggatatatgccctcctgaaaaactttgtttctatacatgaaatattttgattgatttgttggattacatgcttttcagaggactgaaaaggatggaattcaacatgtagtgggagttcccaggggcccatttagagcagtttgcctacaaaattgaaaacagctggcagttttatataaggcaactagcaacctatactcttaagaatgtaatttggtgagtgggatttatgtaataactgatgaatttgcatgtttttctcaaatgactttatttgtatttttcgtttgctcctaggatatcactgaaaattaggattcaggcatttttgcatttttacaattgcatcatgcccatggtcacaaagcagatcattgatgacttggtatctggatgttgatctccctactcttttatccttacatatgttgaattattgtcaccaagtcactttactggttccttaatctacactgattttagaaatcttcatctgtaattcttaagataatttgctaagtattatacagtgtacactgaaaaagtggacttggaaataaaattgcccaagcaaaattttttctctcaacttgccgatatgcatttttgggtatgttttgctgttttaatttattacaggttttttgtttgtttgtttgttttcggggggactgagttttgctcttgttgaccaggttggagtgcagtggcacgatcccggctcactgcaacctccagctcccaggttcaagtgattctcctgctgcctcctgagtagctgggattacaggcatgctccaccatgcccagctaattttttgtatttttagtagagactaaaaatacatttagtttcatcatgttggccaggctggtctcgaactcccgacctcaggtgatctgcctcctaaagtgcagggattacaggcgtgaggcaccgtgcccagcctatttattacagttctatgtttggtctttggcaaaatttgaccatgattattaaaatccatcttccttataattttggtttctaacctattagcagtggttgtgtttctccacttcaaattgcccagcttgagtgttctagagaaaacagataaaagccttatagttattttaaacattcagattactactgtaaactctgttaactttttttttttaaatagaggttcaggaaaatctcaagaaactgaaatttagaatattggactacctataaaaaagcagtataaagggtgcctgaaatcgaactgctcactgacatttgtagggaggtttgatttataacaaataagttgatcaaagaagagtgattgttccaagttagagatctttgtgtgggttagggagtccgattgtaattggatgggaaataaatattttttttcttgaattgtgattggctaaaatccttttctttccatggtattttctaataactgaatctggggattttctctgcttttattatctgaccagtgtgtttgagctgtgtaccagtactaaaagtactaagactgtcgcagacacggtttgtgaaatttcaggacgttgacaagggcccgccacggagcatttgctgttcttataataaagcagtgacgaatttaaatctgtgaatagcttaaacatgtaattagtatcaccacaaatgagaagaatgaaaggatcacattttccccctcgttttcccttgaagtcatgaacggttggttctgctgtgactttggggcttasttttcagtagaagtgttgtcctgctctgctgctgttactgcgggactgctaattcaggctaactcaggcggcgggcgctgtgtgctctgaacatcaaaccgcgggtgaggcgtcaacccaggagtttattttgtgatcagagtggaaccactacacttcactttcccctcacctccacctctgagggagcaacgaatacaaaggtagacccccaaaagctttgaatagctgtcgcctactttcccgcggccctcttcattttttcgtctcccgctgccgccgccgccgccgcctctggatctggacggacccagtggccgctgccgcctccgcagggccgggcactactttccgtctgcggtggttccgccgaccctcccgcggctgctgccccgcccgcgccggcggaaggagacgcgctgcgcgccgccgctgcccggggagggagacggagcagtactggccgcggcgcggtggcggcggctgggctgcctcggggtcttcgacggccgcgttgggttttgtttcagttttcttgtgtggcgctgcagcacaaggctgcgaatctgggagtccaaaggagtgtttgcggggagggcccgaggtcgctgtgtccggggcagagcggccggttcgtcccgagtctgcgctctttcgggtccgctgctgtgtcccggtccgctctcctcagcatgagcggccggtaggagtgaggtttcatcggttccctcgcactggaggargcagcggccgcttcggcagcgacagctatggcggtagagacgcgggcagagctggtgggtaagcggttcctgtgtgtggcggtcggcgacgaggcacgttcggagcgctgggagagcggacgcggctggcgaagctggcgagcgggggtcatccgagccgtgtcacacagggacagccgcaatccggacctggcggtaagagagysagcgccccccttttcccctgccgcgcccgcacccggctctcgcagacgtaccttgcaggcttccctctggcgcctcgctcagcccggccaactggcggtcacgcccctctgcygaacccttggcgcgtttgcccgcatcccttgcctgggtccctgcgtctctccgagcggcttcccctgtggaggtggtgtcggagcaggactcccgggatagccgcggaggctgccctggcccccmtcccggaggggtcgaccgcggctccccgctgtggcgcctgggcggccacggagacctccccgaaaggcggagccgcgagtccggygccgcgcgggcaggtgggggtagggggcggaccactcatggcgacaggcggccagcttccctggtatctcttttcttggaaaagtcttcatagtgctgtagctcgagacttaaaacttatcctgtaaggttgctgaaggggagggagaaaagaaaagagaccttcccacacagtccggggattcctatgtgttttagaggcagaggccgtggtggtggctgtgcccggattcatcctctccttaatagatgcttggctttctaaccgtaaaggataaaagtgaaaaattttggtatggagggtaatctctctttctgtccccaatgtgcttttcttgttagaaaggtatagttctttggagtcaagctgtttctgggttttatacgattttaaataagacgaaaaatgttstcaattaaaatgttaaatgccatgcagaattgattatctttttttttttttggtttcttacatgtgacgctgccagtgctttctttgagtagcgtaggtatgtgcatgatattgagctgtaatatgctctgttgtgttccaagtacattctcactgagggacagcttgaaggtaaggggcggagtagagacaagacatggactagacttccaaaggttgatttatgaatacgtaatctgtgaaatttatttgtaatgccctgagccatttactttttcaatgaaaacttcaaatttaggaaatttttttccctttgtgtgcatgaaagcttacaattccaaattcattgtaatatttgtacaggtatctacctaatattttttacctacctattttaatagtttctgagtgtgtttttgtaaactcgggttttcctcactgtagtcaatgatatggttaatgcggcatgtattaatattgactcgatatcgcaaaataggtgtgttttgctgataggtatttctaacagaaaatagaggtagttttgaaggttttggctggttattttcgtatagaaatgtataatcttccttaaaaagtattggtgatgttagtggttctaaaaattatggcagttcaattcagtaactatttttgtttgtgtaaaaggctgaggtaagaggattgctagagcccaggacttattaagagtccagcctgggcaacataggtgagaccccctcatctgtaaaaaaggaaaaaaaaaatttgtatatataaataacttaattgctctcttagttgggaatttaagtgattaaagagttaagtttgcatatgttagtaaggtattaagctggatattaaaaaataaattatctatggatggtagagattgactggaaagaataggagtttcttcaggtgatagaaatgtttcctatcctgattgttggttacacagatatatatatttgtcaaaactcgttgaattgatactatctttgcgtttcaccatatctaaattttaccaaaaaaagaaaaatgtatgttgaaccatacctatgtgaacccttgatgagtttttttaatctgtctttatttgaaaatttgaatattaatttagtttttttagcctagaatctaccattttagatttattcccagattttcttacattcacatttcttaaacgaaacttggaacagtttagcattaacataatgtaatattcctgttcgactttgattactgcagagtagattttaagttacatgaaattaggctaggcacagtggctcacgcctgtaaacccaacactttgggagactgagatgggaagatacttgagcgcaggagttttgagactagcctgggcaacatggcgaaaccctgtccctacaaaaaatacagaaattagccgggcatagtagtacaatgcctgtggttccatctactggggcggctgaggtgggaggatcacctgagctcagtgaggttgagactgcagtgagccaagattatgccactgcactctagcctgggcgacagagtgagatcctgtctctaaataaataaataaatatgtaaaaagaaagtatatggaaaatgttgaataggctagtttgtgattttttttttaaagctacaaatatgtataattaaaaacctgttaagtctactagaagtcctggctggatacaccaggcaggacatgtgccacaaacctgtggcacatgatttggaaggataatgataagaacttcaaagtagttgagggaatattgtgtctcaaagataatcagttattcttattttgggtcttatgtatgaggaattgccacgtgaattaaatttctataattgtttaattaacgtaatcttggtggtttaaatgttatacgcttattattttgtagttctggagatcacaaataagacctggatcttgctgggctaaaatcaaagtgtggcaagactgtttattctaggagagatccattttctttccttttctagtttttagaagctgtccacattccttggctcatggcccccttcctccatcttaaaagccaaccaagttgtatctctctgaccgtttttccctagtcatctccttctaactctcctgcttccccattacacttctaagtgccctgttgattactttgggccaattgacataatccaggataatcttgccatctattaacaaccataattccttgtaaactttaattctcctttgccatgtaatgtaacagttacaggttcctgggattaggacatggatatctttgggattaaattattttttaccacaccgtggtagcaaacatatttcttgtacaatatgaacatatataatttaatacaaataaagtaagattaaaattttattttttcagccaggggttatagtgatattactttctaatcttttaagtaataagtttaattaatagagttttcattaggttatgttggataatttcaaatagtttgtcaacttttaaaaatatggcgtgagaaccttttgggttatctgtattggaattatctttgctaacaaaatatctaagccttttttatgcaggaggaccaagttgttgaagaagttgaaatatatacagcacattgtgaacctttttcattttgagtttcttttttagccccattactgagttttgtcttgggatacatttttgacattactgctgttctactttttgaggaatttttctagaaaattgatagtttaaggaaaactggcagttgagaagtactgttgcataatatttgtctccttgaataatattgtaatattaattaaatagcagacatcaatttactctcctcttgtttaacttcgcttccatttatgatctcagtgatttatttatttgcttatctatccatccattcatccatacacccatctatctacctttctttgatgcttaggttgattgtatttctgttttcaagccagttctgtctaaagtgtaagtatttaataaaatatgtctggttttttcaatagagaaaaggacaataaaaaatcatactgtgtattaaaggccaaacccataaatttgcttgtatttaggggatatcctgggaatgaagagtttaaactgttgaaatgtgtatcagctgatgttattttgcaaaacttctgtcttaaatatgaataatattcatgtttaggaaatttaaagtgatttatgatttcgcatataaataaaacccctttttgtttttgggtctacacatttctgcttagttttctcatttaagtttcttatttagttggtagcattacatttccttgtatgtttctttatgtcagtctgacatttatattgtcttgcatcattattaaaaatgctgatttctggtctgtttacaaaatgttgaatgtatgaatgaatgaatgatttttacttcattggtcaatacgatcttgataggtttactatagcaaaattggtttttttggtaggtagaaagacttctatgtctgatgtaagtatgccaactatttttcacactcgaatttgttattgctattgctgataaagacttgaatataggaaaatgacgaaattgccccaatggtgggacataaactcgtgcagttactaccactagctagttttaaaagaaggtgatgatcgcccagtaaatgttgttaattgtgtttctgtgtaaaattaaaggggctgttgttttatatgatcttttgacccatcatctatatgttctggcacatattttaaatagggtattccaataatttccaataattttaaatagggaattcagtaagttccagtaattttaaatagggaatgttttcattcattagaataattgaactatagaaattttaccatgtgaaaccttatcgtcttcgtatagggatattattgcatgtgaaagtaaaaatgttaactagatatttcaatgtaattgaaagcatacaggctattttcctgtatttatagattttatatattatttttagacaatttcaaattatatacaagaaatgtctttaagtctaaaattcattttctgtcatcttcacatatttagtaccgtacctagcatttacttaggtgtccataaatgcttatggaataataaaggaatgtcataagttacttgaatattttaattcatactaaccatctcaagtttctattactatttactcttttttgagacagggtcttgctctgttacccaggctggagtgcagtggtgtgatcattgctcactgccgcctggaactcctcaactcaggcaatcctcccacctcacctcctgaatagctgggactacaggcatgtgccactatacccaactaatttttaaatttttttttgtagagatgaggtctcactttgttgcccaggctggtcttggactcctggcctcaagtgagcctcccaccttggcctcccaaaatgctgggattacaggtgtgtgccacctacacctgaccttactatttactcttaattgtaaattttttgtttctsttatggcactgtgtaccttcccctccccagtatccattctatcttttatccaattgtgtggtttgactacaggatgggccatgatttttctaagctaacttacagaatagaactccattgattggtacaggccataaatggatccagtcggagggattccaaggatagcattgtgtgggtatgagtctggaactgctgcagccatttttctactttaaggtaaaccaatttgaaggcaaagctgacatagagaggttaatagtattgacacggtagcaggaaaaaatgtgactgaccaaactttttctgaatcctacatactactgtggatttttctcttatggagttttcattttgggagagtaaatttacttaaggtttaagtctgttttggttcctttttctttgccttggaagcaaaagtatgttaactgatatacatggtaatatttcattccactctttttgaataatgaaagcagcattttcttgaaacttttaaatttgttatttggtgttcagacgttagagtcttgtcatactgatttttgtataactctgatgattttcaaaaagggtgatatgttctgcttttatgtgtccaggtgtatcccaaagctttgtaaaaattaatttgttttaatgtgtatgaagtataaatatctaactttctaaatttttacaaataagaaatagcattgagtttttatattaggaagtgtgccataactcctcacagttaaatagaaatttcaggagagatacatcgttaatatttcagaaattagcaagagagggcaagcttggctttttaggtcacatatatcataaaccctagtttatactctgtcagtgttggtcagataaataactgtaggtccactattctttatctgcaattctgaaattcaaatagctgtagcaactacattttttaatgattcatttggaagcaaaacctgattgactaaactcattttttaagtagagcttaataggaattgagtatttcttataggagaaatattaatgtgctccacttttagggttctgttctaaatccttcagagatgttacatgttgcctaggaactgtgctatattaccatagttaactaccataacgtaaggacttgtactatattaccataatcaactacygtaatgtatgctataggccaagcgcggtggctcacatctgtaatctcagcactttgggaggccaaggcagggagatcacttgagctcaggagttcaagaccagcctgggcaacatggtgaaatcctgtctactgaaaatacaaaaagtagccaggcgtggtggtgtgtgcctgtggtcccagctcctttgggtactgaggtgggaggatggcttgagcctgagaggtcaaggctgcattgagccatgatcatgccactgcactctagcctgggtgacaaagtgagactgttcctcaaaaaaaaaataaataaaataaaaaaaaagctatatttaactttataaaaatccaataaacttttaataccaaaataggttgaaagagtttggatgagggattgttatttgaatactaatacgatttttggtggtgtagatttaatggcaacaaatactgctaattttatttgttaggagatttgatagtgatcatatgtctgcctaatttcagatagtttttccagtgtggattttagcagacttttttttttttttaaagacagggtctcgctctgttgcccaggcggagtacagtggcataattacaggtcatggcagtcactttctgggttcaagagatcctcccacctcagccctacaagtagctggtactacaggaatgagccaccatgcctggctaatttttttttactctttgtagagatggagtctgactgtgttgcccaggctggtctcaaacatctgggctcaagcaatcctcctgccttcagactcccaaagtgttgggattagaggtgtgagccatggcatccagcttcacacttttattagatataaaattcttaatctgacaaagaaagatttagggattacgtacttttagttttacaactggtctttactaaattgttaatgttgaaacattgtctgaaattatcgaattggataaaatccctttgtgtagaatttatattttatattctagctagtttacgaaattattatcttaaacccattgatgaaaatgttgatttatcttatattgtagaactattgatttaattatagaatacatggctaagtagaaaaacagcagctcacaatctgtttactgttttgtctggcaaaacaaaactatgcatactgctgacttacgaaaaactgaaaagagtttttgaaatcacacaatcagtaagtgtcagggcaggaatttgaatgcagatttctgatttcaaatctgttatctctgtactctgccatattgcttctgccaatggtttgtgattcacagactctcaaagtaaaaacccgaaattccctttaactgtaatgttatatattctttctgagccctttctctttcttcatttctatagccctatggtttaagtcctcttggacttttatttctccttccttcctgtctgcagttcctttcatcttcttaatttggtatttcaaattcagtcctttgcttactgtttgttgttgttgttttaatcttgttatttcctttgtagaatttacttgtactatgttgcataattactcacaaatctgcaattaaagtttggccttttttcagtttgatccaccgtctctactgtttggaagctttacatgaatgtcccgtgtgtgggttygaaatagtgtttaaagtataatttattatcttcatgtgaaaccagctgccattttgagatttaatttgaagtttcacctgggcttgaaaacaccttcatcttaaatgtttttccaccttgaacgttggcattaacttagttctgcagatttcttcctttaaattggaacctgctttcccgtctccattcttttcaatttgtactaccacttgctcaaaaccttccttacttgatttatttgggttatatctattgatacttactgtattaaaaactaagctgaaatttttaaaacacaagagcagtttttcataagtcagcactatgcagacatagttttgttttaccagacaaaacacaagtagtctgctgctctgaacactgatgaaagaatgaatggaaaaggcaaataatgtcttagtagtattttgagaagtttttatcttactaatcccttgaatagattttgttgccctggaaacatttggtgaaggtatctgttcatctaattctctttagtagaattatttacattagtatcactaaatagttaaattttaagttgaatttggcttcttcattatttcaggtttcttccagtattttctgtgtggctatattgcttatgaaaattatgtattttgaacgtagaaggttgcatgtaacatgccagaaaatgttaacatggcagtaggaatagtcagcattcctagaatagatttcagattttttcaaagctagaagaggtctgtgtgactaattcatttcttgtgaaagactgacacttaggagctgaaacatctgatccatctgttaaagttaggagttttaagattcaaaaatctttaggctcagaggaatatcaaagaaggaagcagtatgttaatgtttggttaaaattatgtgttatttaatataaaatgactgtatatttaacagaatttatttcctctctatattgtgattctatagatggaatcttgatgcaatacaggactaggagaaatatttgtataagaatttaaagttgatgaactattccaatgtgttgaataacattatactattatttggtctatgttctttttcttctttaaaatcacattgataaaactatgtagagcctattttagagcgtttccactgttcgctagaacattttattgccataattttcaaaatctctgatcatattttaataccaaagtgaatcattttgagggaaaccattttactttacattgttcatgtgaattaagagagtaagttgtgaatatgaatatagactatatgtatttcacctttccgtaacggttttgaactatacaaacatatacacatagttatataatagaaataattattaagaccctttgaactactaagtataacaaggaaaaaagcaaatatgcttacagttaatataatattgcattaaatttgcctcgattttctcagtcttaagagcaaaataagaattgtgattaattaaaatatcatttattttcagtgttttttcactaggttctactgcctttttgaattgctttctttggtgtcttggaaaactaagtgaccagagggtataggagacaagaaacctgagagtactgaattctcattcttacccctttcaattagaacaccactgattttatcagttttatttaataatgatttcataggccagaaaattagattacacagttcttttttcagagagaaggaaataagccatttttaaagagagaaacttttcttgaaaaaaaaatctgaatctggtagcttaatacaagggaaatagcaaatgaagagctgtttcttggtaaataagaatccagtgtgtcattatgaagtatcacttcatgaggatattcctgcaagagattaaaataatattgagatatgtaactgtataatgatcagtggaacctaaaggagaagaaactaataataaatatgactaaagttcatgattgtcaaccttttatttcttgtattccagtgtcccagtggatagggttaagctttaacgtgcagaattgtggaggaaacatgtttgaatggtttttttctagacctcatacccagatactgtgatcttagatatggagtataggacaaaaatctgtactaaaatttattaacttttttgactgggtaccacagaaacataaagaagtatattttgaataatctcactcccacacctgccccgatcagcctagtttaatctgcatctcttttaaataaccatttttgttaatttcttatgttttcttccagagttttttgttaaaaataaagatgtgaacggatgcacgtagtcttattcctcccaggcatatgtaatcaagctgagcataacctaaaggaaaataaccacrttataggtgttgcgatacaatacaacaggaactacacaattcaacttatgaagtatttttgccaagaagaactgaacctgaatataatgaagcttctagattctgacagcagtttacaggacatatggaggtagaggaacatgtgaaactacaccatgaggatacagtcagccatattcattatgtggggaattacagagctgtgcttttcagtatggtagccactaatgtgtggcacttcaataaaatgaaaaatcaggctaggtgcagtagctcatgcctgtaatctcagcactttgggaggccaaggtgggtggatcacttgaggtcaggagttcaagaccagcctgggcaacatggtgaaaccctgtctctactaaaaatgcaaaaattaactgggtgtggtggtgcaggcctgtaatcccagctactaggggggctgaggcatgagacatgagaattgcttgaaaccaggaggtggaggttgccgtgagctgagatcgtaccactacactccagcttgggcaacagagtgagattccatttcaaaaaacaacaaaaaaattagctgggtgtggtggtgcaagcctgtaatcccggctactctggaggctgaggcatgagaatcttgaaccagggtggtggagcttgcagtgagctgagatcatgccactgcactccagcctgggtgacagagggagactcagtctgaaaaagaaaaaaaaaaaaaatcaatttctccttttagagctccgatcacattttgtacgcttggttgacacatatggttaatatccacagtctcagatagtacaaatatagaaaatttccatcattgcaaaaagtgtagatgtggctattcaattggatacagctattctgtagtaaccattaaaaagttaaaaattaaaacatgtaattttctgactagtrgaaaaaaattgggatgatacaaacagaattggaggccgggtgcagtggctcaagcctgtaatcccagcactctgggaggctgaggcgagcggatcacctgaggtcaggagttcaagaccagcctggccaacatggtgaaacccagtctctactaaaaatacaaaaattagccgggtgtagttccagctactcaggaggctgaggcaggagaatcgcttgaacctaggaggcggaggttgcagtgagccaaagtagcgctactgtccttcaacctgggcaacagagcgagactctatctcaaaacaaaacaaaaaacaaaaaaaaactattgctttttcacatgcaagttttttcctagtctcttgccgtttttaactacttatagtacattattctgtatggctttgcttgacagacgcaaaggatcagtaaaaatttttcctttggcatcaggcctttgtttcagcttaagaaatkctttctaatttgaaattatattttaaaacattcactttttctccagtaatataaaatgtctgtgtcttttgctatattttaggaatatttgtggactatctgttatattccatatatctttctgtttcttgtaccgcaagatcagagtgttttaatgattgcagttttatagaatcttaataggtaagcaaatctgttcattactcttcattttcaataatggacattctttaaaaaatttttcttattgtaaaatatatgtaacaaaacttacaattttaactatttttgttttggtttgtttgagacagggtcttgctctgtcacccaggctggagtgcagtggcgccatctcggctcactgcaccctccgcctcctgggttcaagcgattctcatgcctcagcctcccgagtagctgtggttacaggcacctgccaccacacccggccagtttttgcacttttggtagagatggggttttgctctgtttgccaggctagtctcaaactcctgacctcaagtgatccgcctgcctcagcctcccaaagtgctgggattacaggtgtgagccacgcacagctcattttaaccatttttaagtgtacagtttagtaacattaagtatattaacaatattttgaaattatcagtactatccattgtcagaagtttatcatcccaaacagaaactctctatctaatgtctctgtgaatttgcctgtccttcataaaagtggaatcatacaatatttgtacttttgtgtctggcttattttaacttagcataatgtcaaggtttatctgtgttgtagcaagtatcataacttcacttcttttttatggctgagtaatattccattgcatatatataccacattttatttatctaccaaagggtagaaggattgcttctaccttttggctattgtgaataatgctgccatgaatatcagcatatctatttaagtccctgctttttacttccttggggtatgtacccagaattggaattgctggatcatatggtaattttatgttttgtgaggaaccactgcacagttttccacagtggctgcaccattatatgttctcaacagcaatgaagatggattccagtttctctacatcctagtcaacacttactatttcctgggtgttgtttgaaaatagccatcctagtgagtgtgaaatggcatttcattatgataattttcccaatgattagtgatttttgagcatcttttcatgtgcatgttcacaatttgtgtatctcctttggagaaatgttttaagttgttcacccagttttgattcagcatgttttgttttgttttgctttgttataggagttctttacatattctggttattagtaccttatcagctaaatgattagagatatattctctattctgtgggttgccttttcacattcttgataatgtcttttgatgcataggaaaattataaattttaatgtagttcartgtatccatyttttattttgttgttggtgcttttggtgtcatttcccagaagttgctgccaaatctaatrttattgaagctttcctgtcttcatttgcttctaagtcttctatagtttcagctcttgatttagttcttctatccatttttagttgacttttgtgtatggtgtaaaataagggtccagctttattttcttacatctgttaatctcattttctcagctccatttattgaaaagactgtcctttttccattgaatagttttggcacctttttcaaaaattatttggccatatatgcaggggtttatctctggtctctgtcttcatctgtacagttgtctctcagtatcgtgggggattgattagagcccccaaatccatggatggtcaagtgctttatcagccttaaggtggcatagtatttgcatgtaacctacatacttctttctgtatatgttcagtcatctctagaatacttaaaattcctaatacaatgtcagtgctatatagtacttataatacctaatgcagtgtaaatgctctgtaaatagttgttatactgtatttttcaaattcatattttttwaatttttttctgaatatttttgatctatcattggttgaactcatgaatgcagtacagaggaccgacagtatagctgtctttatcccagtcctgcagcgtttttgattactgtgggtttgtagtaagtttgaaatcaggaagtgtgagttattcaactctgttctttttcaagattgttttggctgttaagggtcccctgcgattccatgtggatttcagaattgatttttctatttctgtagaaaacatggggatattaatagggtttgtatgtattgaatctgtagatggctttgggtagtgctgatatcttaatatcggatyttctgatccacaaacacagatgtctttccatttatttgtgtgtttaatttcctttgatatgtaccagtcatttgtctccttggtttcttaygtattatttttttgatgttactgtaaatggaattgctttaataatttccttttcagattgtccattgttgatttatagaaacacaactgatttatctgtgttgatttttgtatactgcaacattgccgaatctgttagctctaagagttttttttttttttctgtgtgtgtgtgaaattgttagggttttgtacataacaaattatgtcatttgaacagaggtaattttacttcttcttttccaatttgaatgtcttatctaagtttctgactagtccaatgctgcgttgratagaagtggcaacagcaggtatccttgtcttgctcttgatcttagagaaaaagcttttagtgtttcaccattgagtatgatgttagctgtggaatgttcatacctggccttcattatgctgtattttccttcttttcctagttggtagagtgttttatgaaaaaatgttgactttgtcacatgctttatctgcatcaattgagatgatcataaaattttttttcccttcattatgtgaatgtattgtatttattgasttttgtgtgttgaaccatcctcgcattccagcaataaatctcagttatggtatataatttttttttaatttctctttttaagagacatgatctcactcttttacccaggcagtagtcctatggctgttcacaggcagagtcatggtaataatggtaataatgctgctatggtaataatgctgctgtgaacatcagtgtatgaatatccttttttacacccctggcctcaaatgatcctcctgccacagccttccaattagcaggaactacagatgggtacctctgcacctggctttaattgcatttaactaaaaaaaaaaaattattttgtgatgcctttcattgtttctttgcctttctcacactaataccctggtctaattttgcttttcttttcctctttttttgttttttgttttttgagacagggtctcactctgtcacccatactggagtgcagtggcacaatcacagctcattgtagcccggacctcctgggcccaagtgagcctcctatctcagcctcccaagttactgggtccacaggtatgtgccaccatgcctgcctaatttttaaattttttttgaagatggagtgtccctttgttgcccaggctggtctcaaactggcctcaagtgatcttcccacctcggcctcccaaaatgctgggattacaggcaagarccgtcacacctggcctaactttgcttggaattgtgtacagttttatagactaatttaggaagtatgaatatcttttcattactgagtctgcacttcaaataacatgtagtatccctccagctattcatgtttgatttttttaaatattctccagtggatatgattttcttcatatacgtcctgtgtttgttaggcttattcttagacactatatattttgacacttagatgtatattgatatatgcctgaatcattaatacatatcttttactcatttgtttcttcagacacaacttttggaataaaaataatgtgatctttcttttcccagtatatatttttagctcatataatagcttggtagcttttttcattcataggcttaataaagttacagtagactttatatatatgaaaagtgttataaagaaaaagtgaaataatgttactagcttcttaaatcttgcctaaagttttaataaactgttcaagatgttatttccttatcatgtcttttgttttatcattatgatcaatggaaatataatatttattttacagaatttcacttttagattgtgtaccagttcatcttcaagtgaaactgtaacaaaaaatttctcattcaaaatacagatttaaaaacattttagtgatgattatttactatacaaagcaagtatatattagaatcctttacattttattttattttattttattttatttttgagacggagtcttgctctgtcatcaaggctggagtgcagtggtgagatcttggctcactgcagcctctgcctcctgggttcaagtgattctcccgtctcagcctcctgagtagctggaattacaggcacacgccaccgcacctggctaatttttgtatttttagtagagaaggggtttcaccatgttggccaggctggkctcgaactcctgacttcaggtgattcgcccacctctgcctccaaagtgctgggattacaggtgtgagccaccgcgcccgacctcctgaagtatcttaaacactactttttcaaaatgctgttatctattcaatacaatcccaatgtgtttagcatgatatatatgtagaccttttatagagttcttttaattctctgcaatagacttcaaatgatttctcacctctgtcaagttttagagaactgctttatttctatttctctagaacactatactttagcaagggttaaaatttggagaatagcaaactgactttctcatgtatttccttcaggttctaatgtttttaaacattgrtagggttgaggaaataacagatcagaatgtatccacttcaaacaacaaatggttatactctgaattcttggctgaggtacttgtgatattttaaaatgtattagggctgggtgtggaggctcacacctgtaattccagcactttgggaggccgaggcaggtggatcacttgaggtcaggagttcgagagcagcctggccaacatgatgaaacctcgcctctattaaaaatacaaaaatgagctgggcatggtggcatgcatctgtaatcccagctacttgagaggctgaggcaagagaatcccatgaacctgggaggtggaggttgcagtgaggggagattgtaccgctacactccagcctaggtgacagagcaagactccatctcaaataaaataaaattaaaatwaaataaaatgtattgggaaaatgtttagttttactaaattcagtaatgcacaaaggatgaaaagaggataggcgctttaggtatttatggtctrttaatgtctttttttatttttacataggacaaaagcaataaccttggttttcacaatactttattagactttgtttcaaggaaattttttctttctctctctctttttatttttatttttggagacagagtcttgctccatcacccaggctggagtgcagtggcgtggtctcagctcactgcaacctttgcctcctgggttcaagtgattctcctgcctsagcctcccaagtagctgggagtacaggtgtgtgccaccatacccagctgatttttttatttttagtagagatggggttcaccacctaccttcccctatggttgacatactgcaactagatggacaatgcacttatactgctgattccttttagttgtgatattgatgccacaaaaccatagaaaataagatttgatcacttcaggttataaactgttacctttattatttctgtccatctaagtaatttggaatattatgattcatgttagagtacccagcagatgtgaaggaaaatatataagcttagtgaaattttgactggtcacttaattgttcattgggaaatgaaagaggtctagaatatgttgaagtttattacagacaaaaataaaaatgaaggggaatctaaatgcattaacattttgtaccttttaatattatagtttttttcttcctctgttccaaagttttccagatactgtagcctgctttttactatgttgataaagaggaggtgtctgagaagctttgtagaaataatgtgggaacatggagaagaactgaattgaggtcagggaarctataaacctttgagtgcttttgtgatgtgatgtgctctatgggaggctgtgtatgagttcaagcttgagaaacttgcttgataaaaatgtgactattaacacttactgttccttcctcttgttaagagtctcttgagaagatgaatttttatttaaatactgttttgtctttttttttttttcctggttataaaatgcttacagatattttgtccttagagttatacctatccctcacaaataacctgaaacataaatataataacagagtatgtcacaaagataggaaattcctggtgattccagagaaactggaatctctagtttgtaaggaaaatagtctctatctttggcttctttggcttgtaaagtgcttggtattatacagattgtccccagtttgttgactcctattatgacttgaacctgctctagaaaggcttttgcccccattactccaaggaaactgcagtgatcaaggttgcaaattacctcgtctttttaaaatcaagcatcattttccagtcttcattttactgggcttatcagcagcatttaatatggttaatcaccttcttttccttcaagtmctttgtttattttgcatcctaggacattatgctcacttggtttttctcgtatctgtctttcttgcctctccttggaaggttttcctcatatctacaatcctttaagggctaatttcttggacgtcttttctagctacgctcttgttcttggtcacatctattcctataacctttaataccatctatatgctggagacttctatatctatgtccttgtttggatctctcccctaaatctcagactcttgttgaaacagcttattcattgtctctatttggatgtctaataggcatctcagacttaatatgtccgcagctgagttcctgatactaacctgttctgccttgagtcttcattatccagtaaatagcaactccatccttctagtttaggtcccttgcagtcatcctggactcctttctctcacatcccatatccaaactgtcaagaaagtcttgttggttctatctataaaacatattcagatcccaggcggggcgtggtggctcaacgcctgtaatctcagcactcggggaggccaaggcrggtacattgcttgagtctaggagttcaagaccagcctgggcaacatggcaaaactctgtctactaaaaatacaaaaaattagctaggcgtggtggcacgcacctgtagacccagctacttgggaggctgaggtgggagaatcgcctgagcctgggaggttgaggctgcagtgagcccagatcacaccactgcactccagcctaggtaaccagagtgagactctgtctggraaaaaaaaaaaaaaaaaaaaaaaaaaaattcagatcccagcacatgtcattttttctattagcattatactagttcaaacctacattatcttttgcctagattttcctcttaagagtctgttgagtctatttctagtagtcacttaactagttacttgtaactagatatctaactgcctcctaactagttcttacccataaaagtctatagtgcctatagcaaacagtcagattatgttacttttatggtcagatgcctccaaaggcttctaaactgattaagaataaaagatgaaggccttataatgggctgagagactctacatgatatcctgctttccagtcattccacatcgacattatcttctattaccctcttacttggcctttttgctgttccttgaacatgtcaggtctggtctccccttatggcctttgcacttgtttctctgtctagaattttttccccaaagatacccacatgactccatcacttctttctggtaagtatgttcaaatgttaacatgcttgctcattttggtcttctttgaagactaccttatctaaaattgacctcttccctcctctgtcaacattttctatcatctatcaccaaatatcactctacttgctttgtctcttatttcttttttaaaataaaaatcatttaaagactggctcttgttctgtcacccaggttggagtacgatggcgtggtcatagcttactgcaatctcaaattcctgggctcaggtgatccacccaagtagctgggactacagatgtgtaccaccacacccagctaattttttttaattgtttttttgtagagactgggtatcactatgttgcccaggctggtcttgaactcctggcctcaagcgatcctttcacctcagcttcccaaagtgatgggattacaggtgggagccactgcatctggcccttgtctcttatttctgtcatactaaacattgtacttctttttctgcattagaattaaattgctccattaaatggacttttatcagctttgataaactgtattcccagcattgagaacattgcttagtrgatagtaggtattcacaaaaaaattagctgggcgtggtggtgggcacctgtaatgccagcttctcaggaggctgaggcaggagaatcacttgaactcaggaggcggaggttgcagtgagctgagatcgtgttattgcactccagcccgggcagcaagagtgaaactctgtctccaaaaaaaaaaaaaaaaaagatagtaggtattcagtaattgtttgtttaattaattaaatagaaatgtccaccgggtacggaggcgcacgcctgtaatcccagcactttgggaggccgaggcaggtggatcacttgagttcaggagttcaggaccagcctggccaacatggtgaaacccggtctctactaaaaatacaaaaattagatgggtgtggtggcatgcgcctgtaatcctagctactcgggaggctgaggcaggagaatctcttgaacctgggaggcggaggttgcggtgagtcgagattgtgccactgcactccagcctaggtgacagagtgagactctatctcaaaataaataaataaataaataaatagaaatgtcctagaattttttgaaatttatctttaattctttgagatgcatcactttttattttgaaaaaatcctagtaaaaccaataaaataaaactctgtaatatgcatatatgaaatcagaaaactcctcagtcacttactgttatgaattgactctcagtaaatgttttgaatgtataaatatcaagtattgattatgtatgtggtcagtgttgyaggctaacatagcatttaagaagtaaacccgttctcaagaaatttctacttctagtggagagagttgatgaatattcagcggttgattcatactactgtatacagttgtatatttagaaacatgtttgttatttgttcccagttcctggcacagagcttctgatacccttggactctcccgagtgataggggtgatagaagtgtcatttcttctatgaggcaacccttggtggacttctagataacttcagggtatggtctggtcaccaraaagaccagaccttgaatagaagcttggaacactctcatctccatgmcctaacctctggggagtggggagtgactggagatagagtaaattaccagtggcatatgtaaccaaacctctataaaaggtttgcatatgtaaccagacctctataaaaacctgtcaaaaggctgggagcagtggctcacgcctgtaatcccagtactttgggaggccaagttgggtgggtgcctttgagctcaggagtttgagaccagcctgggcaacatagcaaaaccctgtttctacaaccattacaaaaattagcggggtgcggtggctcacacctgtagtcccagctactcgggaggctgaggctggagaatcacttgactcaggaagaagaggttgcagtgagccaagatgctgccactgcatcccagcgtgggtgacagagtcagaccctgtgtcaaaagaagaaaaagcaaaacaaaacaaaaaaaacaaaaccctgtaaatgatgggatttggagagctgagagggtgacaccctgagagagggtgtggaagctggaagctcccttacttcctacctcaccccatgcatttcttctgtttggtggttcttgggttgtatcctttataataataatctagtaagaaaatgctttcctgagttctgtgagttattgcaccaaattacctaactggaggagggggcctgggagcccccaattattgctggtcagttgatcaatcagaggattggggaaccccatgcttgtgactggtgtatgaagtaatggcagtcttgtgagacttaaatctgtggagtctgatgctaactctgggtagtgtcagaattgaattgtagggcacctagttgatgtcagagagtcggagaagtggtattggaaaagacatcatgtatttggtgttaggaggaaaaaaaactcaatacttaaggattggattatgtagtaataagtgctgtagatattaagagaaggaacaatatgaaaatgtggcattgttatactttctatgacaggaaggcttaatggagaagctggattatataaaggatgggtaagagttgtgtttgatgaagagactgtattccagagaggagaataatgtgaatatttgcttggaggcaagaaatgtatggcatggaaacagaaacacttgccacatttttatgccatcttgaaaactttctcttcgttttctggttggttacattttgaattataatgcatttattttatgcacattaaatacataacattctgctgcattgctagaagttacagatgatataatgacctaagtctcttctttttagaagtttataagtttaatcgttcttgagtcaaatctgaaacaaatatgaatacacatactttcttcatatatattcaacattgtcttaatgtattttgtgtgtgcgtgtsatatactttaaactgcattgtaagttctctggtatcctagatttattaagaataactgatttcaaattgatatatacccaggtttaaaaattgttggcgttttttctccctggcagtctaggacatcctactctgggcttgttcactatactctttaccctgtaatggcaaaactcaactcttgattagatcagtcttcctgaatctttggacagtatttttggttgcttgtctgtacatcattttaccaggtctaattttcttgctgaagatctcaccagttacctcaaccagtcatcagtatgtacatttaataccttagatgtgtagtccacagaacagtgctttacaaataacaggtgctatataaatattcttgaatatttaaatgtctagtacatgttattcacttgggtctcccatgcttcaaaaacacctaacgctgttaacattgagaagaggattgagaggagcagaatacaaaggtatttattaaggtgattataatagccgtagaataacaggccagagaactgaaagtgattgaataatgagaataaaaacaaaggaagagggttgagtgtggcagtacaaagggatcaaagtcagggtttttttcactcccaccatatgttggagttaaccctttaagtcagcagctgattatgatgtgattttgttgaaaactgggtgatgcttggaaaaggaaaactgagaagagggcgttaagtaaagttgaggaactcaaaatgagataattttgagaaggacttatgatctaatgcaggaggaagggaggagtgattggtattagttcccattaatatagtacttcctgtgtgctacgtattgtcttaatcttgagcactttatatgtattagcttacttcgtccccatggaaactttgtaagttcattactactattatttccattttataggtctggaaactgaggaataaagagactagaagaatttctccagctcatgcatattataactgataactagtatttgaacccaggtcctatgactccagagtccactttcttttgtgttatactaggtcccagtaatagaatccaaggacacctttaggagttacagaattaagtgactgtcaagattcagtctaaaccgtgtaaaaaagggagagtcttctaaataaatggattaaagagagctttcagttcttttgtatatgcaatactgttttacacacggcctttttctgtttgtgcctttttcctacaatccctttgcctttacacctactctgtgcctggttaattcctactgtccttttaaagcacagttcttccaggaagttttccctgacctcaagcacttttcctcctacttgtttgtgttagtgacttcatagtaggttgtcttcataactgttaacttgtatgatttaacctctctgaaccatggcttttttgatctataagataggtactattttacctaaaagggttgttatatgaattgagtgaaattgtatgaagcagttaccacagtgccrttttatgtttcttttactaaacctggttgtgcacacttagtgttagggagacttcagtagacagtacagtaataaaggtcagtaacctcaaggctcagtcttcaaggaagatattttgaattaaaatatccagcaacagtctggtggttctcttccttctgagactcagttgtctcctggggttctaagaggtagatcatagaaactttttataaaggctaccattatttggtggatgctcagagaatgtgtttgaattttgttgattagaaacttctgaatgaaaaacaatgtaattagaatcatttgaggtattataaaggcagatgtgaatgtctggatgtttactgaaattgcagaattttcttattgatttgagtaatacttccttaatcgactctccttcgtgtgctcgcacgcttgcgctctctctctctctctctctmtmtatatatatatatatattttttttttttcttttgagacagagtgttgctcttgtcacccaagctggagtgcagtggtgcagtcttggctcactgcaacctccatctcccaggttcaagcgattctcctgcctcagcctcctgagtagctgagattaaagtcgcctgccaccatgcttagctaatttttgtatttttagtggagatggggtttcactatgttggtcaggctgatctcaaactcttcacctcaggtgatccgcccaccttggcctcccaaagtgggcaatagttactgaaaaaatatccatcagtaatcctggttagttttctgtaatgtgcctatgtttctcagtgtctttacactgtctgtagattaaggttgctttcatatctcactgtcaccttaggcatcattgtatctcattcccttgctgcatacgcactgttctctaattggtaggtattgtcatccttgtagctgatagagaaataagttcctagttaactttgttatgtcaaattacttaaaaaaataaactgtagactagaaggactgcagtatatatgtcagtgaagtgacttcatgacatataagtgacttttttatgatctacatgttgtttttatatatgatagtattagagaattatacggtctgtttttcaattatttacctaaataaaataatttgaggtgacttttgttaaggataactatgaataagattgataaaatagaaataaggccttaaaaaccatccgtgtaaactgaggtggttcaatagaaatatcctcctcaacttaaatgtatgaacaaatggtaagtgtttaattctgaaatttgttacttgtgtggagttgttgagagtcagggatatatttggtaagtaatgaaataaataaatttttaagagattgtttttcctggctgagtttaaaaagaacgcatttctctttaagtaatattaaatgttgtaattaatagtgatgtttataatagttttgtggtttgcgtggaggttcttcatgtggctgttaaaaaataataattctcagtgaaagccaggaacagaacattacacaataacttactgttgtttctacagagaagaaagctactgaggtctaaaaatacagctttataaaatgatagaattttgagtatgtactaatgggcattaatactttatcctgtggtatttgaagaccgttttcacacaagcatcttcaaatatcagtgttatttagtctttgacaggtgttggatagcagttaaagattgaagtatgagggggcaatcctagatttatccattcagcagatacttattgcatgccttgtacatatcaggcactgggaataaagttgtgaaaggaagtggatcaaattgctgcccttatggaaatcagtttatggaaggagagacaaaagataagaagataaatgagtatgatgaatggtatgtaagataaagtaccaggaaagaaaataaaagcatgaatgttgagggggcggaggtgacattttagataagggagccagagaatgcctctccgagtaggtgacttttgagtgaagacctgaaggaaacaaggaagctagtcacgtagatgtctggagtaagtaccaggcctaaggaagagcaaaatacacagcccctgagattgggaatgagcctagcgtatttgaggagcagtgaatgtggtatggtcagagagcagtgaaaagtgggagaggagaaggaaaagatcagaaggggaacaggatggcaggggatagtttgtgaaggaccttatagaacattttaaggattaagctttcattctggatgagatgggaaggcatgaacgaggtggttttaaaaggatccctctactttctttgttgatagtagactcttggggtgtggggtgaggcagatgcagggagagcggttaggaggcaattgtaacgattctgtggtagcattagatcatggtgatagcaatggtagaggtggtgaaaaatgctcagattcatatttatttccaacacagaattgataagagtgggttgctgaattgcatctgatgtgagagacagggtttaagatgggttctaaggttttggctcctgcaaaacatagagttaccattttttttcagatgagaattgactggaggagcagacattttggagagtggtggtgatagcggtaataatactggggattgggaatctgtcttttagatgtgttaaatttgagatgcttatttagacaggcagttacttaaagtatcatgtttgttagttaaagggagaggtctaggctggagaatctgggagtagtcagtatataaatggcatttaaagctatcagactgaatgagttgatgtagagagtgaatatagaacatacctaagtgttaaaccctggagcagtttttaaagattagatatatgagaaagaagggacagggaggtatgaaatccagaagtgatgttcagaaagcttagtggaaaaagtgtttcgaagaggagggattactggttgtgtcaaatgctgcttagtgaagtaagataaaggctgagaatctacaattcagttttagctaatgagtcattggtaaccttgatcagcagtttcagtgtaatagtgggaacaaaagcctgataaagtgagtttactagagaactggaggtagtagattggagacagagattattgacaaggcatttgggaaaaagagaaatggagcagagctttaggaggaagataagattttgtaaaatggaagacaatataccatatttgtatgttgatgaaaacaattcagagataggattaagttgatgatgcaactaaggaggaattactagaaccctgtctttaggtagtagtagaattggccttagatagtaccataaacttaatccctagtaatagaagagaagaaagagatactgtatttgagaatagctgtaggtagctaggtagtgagagagaggtaagagcttgtggaaatctgattgcttctgctttttagtgaaatagcagctgataggatttgagaagagaagttatgaaatagtcatctaggggagtaaagattgaatgaaataaggaaattatgtacagcaaagactgacttgacattggtcatgattttttaactgacatcgttaatctttgatgaattcatcattcatttccctacagtcactcatctccagctatgttcagctgattgattagatacagaaacaaagtaggtggagagttggatttaatgatgattggggtttggctggaaaactaagatgcattcagagatgggcaaatgaattactctaatgatagacctaggattttacatttggtgagcaaaaaagtgagaaaatgagagatgaatagcaatgaaatggtgttgagatcagtgaatcttaggtccaggggaacttgaatgtgaaaaagaaaaataggaggtagtggcatgagagagagaaagatgcttgaaatcgagatttttgagggattgctgtttggggccatgataagggtctaagataggatttcttatgtctgaaaggataatccataggtttatattgcctgagtaaagttaaagatcctctggtctagagtatgccatggtaagtcagtggttgagataaggttgaggacaaaatcattaaagaagaggaaatcaaagaaatgagaaatggaacaattaaaacagtcatcactgtggatactgaaatcaccagaaatgattattggacagaaactaggacagaaataatattgaatggcatgatgaataacattttagggtacgcatgagtgtggtggatgactggttgatggtagtaggttagtataatgtgctgttcagatttcaaggtactgatttttagagatgagaggatagaagtctgaaaatcatggtagaggaaacagctacaccaccatacaagagagctagtaagtagcttcaaaggagattttaagagtgattttaacttggggaatttaagagctggagtcattgtttacttcactgtggcacctttgaaactgttacattaacataaggtaattgaagaattgttattcctcttgtattcaactgaatatttatggttagcttacagaaatttgcagttgtgaaacagaacagaaacttgtgttgaattcggctactacttaaatatgcatttttaatactctttaacacctcctccctcctcatataatctctcaaggcctgtgattacatattgcatattgaagtcacttcttttttctctttcatagatattaatgccttccaatgcactgttgttgatagaatataaaactatgaggtaaaaatatctcagggttttgcctttctttgaatatagaatctaacctttccaccatattgggtatttatttagagagggtactcaagtattttgccacactcttttttagtttgtttgtttgagacagcgtcttgctctgtttcccaggttggagtgcagtggtgcgatcttggctcactgcaacttctgcctcctgggttctagcagttctcatatctcagcctcctgcgtagctgggattataggcgcatgccaccatgccagctaatttttgtacttttaatagagatggtgttttaccatgttggccagattcgtgtcgaactcctgacctcagccagtccacgcgcctcagcctcccaaagtgctgggattacagatgtaagccactgcgcccggcattgtcaccctcttaagtcattttcaactggaattcaggagtcactatgtgggacactgtgagccggtagaatattctaaaactcagaaatacatattaatcctcagaaattagaaatttcttttccaagtttttcattttccatttcttggactatttgctgttacaatctgtgtttactataatctttccaaattaaatattagttttgtctctgttctacttatttgatttattcagtcattccctcccacttttcaattattcagcctgttaaaagtacaactgtttcttttctggaaaaaataagccaaagctagaaattgttcaagcaggagattttgtttgtggagtgaaagtgaacctcactaaaatagcagtgtgttacatcctggactggcatgtatacagaaaacagcaaattgatctgtaaggcactgttgtagtaaaggagtgcaagttataatctcagctgaatgataaaaggtgatttatatgagaagattacaggtcaggaaatgatttattccaaatgcaaatacttgagcgcattgttcagtagagacaacatttttgtgtaggctatttcgcagacaatgtgagattttaattggtgttctaaagatatgctattggtatgaggaagtgttgtgaggagggcattttacagcagatattattctagggcaatttttttgtccattacaaatctttgtgagttttttcagtgccctgtaaattacgaagttaatcactccaactgttgggaacaggaactattccaaactcaggtgaacttagagaatttcactctctcattctttcagtttgtttcatccacctttgtgtagcttcttaaaagcacataggcttggtcaatcttttttttttgtttgtttttcttaatagatgcgctctgactttgttgcccaggctgatcttgaactcctgggctcaagtgatccttcccgccttggcctcccaaagtgctagggtttactgcgtgagccactgtgcctggcccaggttggtcaatctttatctcattgcttagagagaacctcctctggaaatcttcctctctcggtagcttattcctctctagtattgtgtcctgagaactccagagtcttagcctccctggacttctttctagccttatctccttgacttacaaaggctcctgaatcccatgtgatttcccccttctttgcaggatagtttggaaacttcagtcagttaaactggtttgatcagaaagcttacataatttgtttcccataacctagtccattgccgtttgtaacgtatgttgcatcttaattgtttcatctgtttttccaggttttttgttgtttcaggcagaaacataaatgccaactctgctaattcatctcactgaaaacagaagtctgcttattaaattttagctttttgttattaaaatttaaataaaatgtacatgttgggtacccaatagatgttagccccaaagctgcaaaatactggcttgtagaagtgttttgttggtttatatgacaatttagattttgggacattaaacataaaaactggatttgggatttctcttgatacgtttatactgtaatattttgtttgcatttcagcatttagctgtaactgaaatgattcctagtttagtcacagcataccctctctaaattgttagcttaattttcccttttttttttttttggaactcaatttatatcgtatgggccaggtacagtgactcagacccgtaatcccagcactttgggagactgaggtgggaggattgcttgaggccaagagttcaagatcagcctgggtaacatagtgggaccccatatgtacaaaaaataattaactgcatgtggtggtacacgtgtgtagtatcagctacttgggaggctgaggtgggaggatcacttgagtgccagaggtcgaaactgcagtgagccatgatctcacccttgcactccagcctcagcatcaaagcgagaccctgtctcaaaaaaaaaaaaaaaaagaaaagaaaagrgtacattgtttcttgcccagtagagtttgaaaattgtcattgaggagatatgaatattatcatcatggtttgtgaatgacgtaattgaattatgagttattcctgatgttacagttaagccattgctgctattttttaaattctcagtatctaaataaataaataactcccttaggccgggcgcggtggcacaagcctgtaatcccagcactttgggaggccaaggcgagcggatcacctgaggttaggagttcgagaccagcctgaccaacatgaagaaacaccatctctactaaaaatacagaattagccgggcatggtagcgctttcctgtaatcccagctactcgggaggctgaggcaggagaatcgcttgaactggggtcggggggcagaggttgtggtgagcccagatcgcggcattgcactccagcctgggcaacaagagcaaaactctgtctcaaaaaaaaaaaatgataataataaaataaataaatcccttgtttgagatccatgtatataggaaaacagattatttttattttgtgtttataacctatggtaggttgacagtgaagagaagaactcaggacagttaatgaaagcatcaccttttctttactgagatctcctgtgtaaggaaatcattcagttagtcttagaattgtcatgaaagattaagaaatgttcatagcattgtgatcatcatcttaggtattcagtcggtgaatttctgtttttaggtgtaatctaaaagttctgtaaaataaacatcaacaatgttgtatgctkcttatggctgttctaggtctctgtgtttttattatgaacttgtatctgatcttttcaagtttttgtctcatggtattttttcctcaatgccaattaacagtggttaagcaaaatagataaggttttccttctaagtccagaagtagacattccagagttgatgtgatcatttaaggatgccagggctgttgaagactgggctgttgttctcttggtcttttcctcatggtcagttacaatatagctgataytgttgttgtcttccttagttcagctccaggcaggaaggaggaggaagcagaaaagggcaagaaggctcatagtgtcacacacacaatgggtgggttcatttgcttggtggatgacaagtccagtgaccacaaccaagtatgatttcacagggggattttattacttgcaccaagtaaggaggacactagggatagtcccaaaggcagtgcctccccaaacaaaggtgaacacccgggctagttagctgagtcattgtattagaggtggaataaaggcagtgcaggcacatttatcatgcttttacatacatcagatgtatagaaaatggcacataaactacttcctgggtggggattttagtatggtagtgaggagagtttgccagaagttcatctccagtttagtcatctctggacccaaccactgggctgagcttctttctggaacttcttgaaacaacaagaactcaaggcgcaacagttacaaaagtgagttttctttttctttttcttttcagacggagtcttgctctgtcgccaggctggagtgcagtgacgccatcttggctcaccgcaacccctgtcccctgggttcaagcgattgtcctgcctcagcctcccgattagttgggactacaggaatgcaccaccatgcccagctaatttttgtacttttagtagagatggggtttcaccttgttggccagggtggtctctatctctggacctcgtgatccgcccgcctcggcctcccaaagtgctgggattacaggcgtgcgccactgcgcccggccgcaagtgagtactttttcacagtgcataccccaaaacctggggaccctgagttacaatatcaccttagtttgcccctagtcaaggagctttctaaaactcaccccaagtcatctcaaatattacatcttatttaccagaattacgtcatattatcgtctctgtcttccagaaccttaaaaattttaggatagtccattattgcacctagcaaaatcagtgttcttttggtaagaaagcaggagtagatggatactgtatttacaacttgaagtccctacctcagaaaccaccatactttaggagccttctgttatacccataggttggcctcattttccataactgtgcctcttctgaaagcataaaactacaatatgtcattcttacatatttctgtacattaatcttattttttcccttagcttttattctcttaacttcctcaataattaagttggtctttttgaatgagatggttgccctccaaatgttttgaaagcagaagtgattaatgtttgtaagtcaatatatgttatagtattttattgttcatactctgtcatttcctcctttcacagaccagtagatatacttggttataaagtctataatccctgaatttgtttgcttttcatgaccatctgcactggttttattgtcatctaatgtaggtgttaagccattgtcacttttttaaaaaaatagttttgccagagtcagtggatcacgtctatactcctaacactttgggaagcgaggtgggaggattgcatgaacccaggagttcgtcttcatcgaacgaaacaaaacaaaacaaaaattagccggtatggtgttaaacaccttgtagtcccagctactcgggaagctgaggtgcgaggatctcatgagcccaggaattccaggatgcggtgacctgtgatcatgccactgctctccagtgagtgagctcttgtctctaaaataaataaattagatagttttattgagatataatttacatagcataaaattaaaccttataaaattcattgatttgtagtataccacagagttgtgcaaccatgacccctatctaattttagtatacccccaaaagaaactcactatccgttagcagtcacttgtgttcctcttcctgccacttccagccctttggcaacygcttatctactctcttgtctctatggaaatgtctgttgtgaacattccatataaatgaaatcatataatctgtgcccttttgcatctagctttctttcacttaatgctctcaagatttattcatgttgtagcatgttgttaagacaacttccttatcagataatgatttgcaaatattttcttctattctttagcttgtcttttcactcttgattttgatgaagcccaatttatgttttcttttgttacttgtgcttttggtgtcacatctaagaaaccattgcccaactcaatgtcacaaagatattcttatatgttttcttctaagagtttgatagttatgggtcttacatattggtctctgatttgttttgagttagttttgtatatggtgtgaagtaatttcccaactttattttttgtatatggaaacccagttgtcccagtactatttaagagactcttctttcccccattgagttgtcttggaaccataccaacttttttaaaaagtggctttagaaatagttgtgcataaataaacatgatttttttattcttaatattgaatctggatatttagaaatgggatagagtttttagtccttagataagagcttacttccctgtttacaattactaggatagcaagtagctcacagtaggaactctgaataggtttgttgaatatatatggatggtgtcttgagaggaaattgagtgggtgaatttaaatgctgttggagcattcagttagagatactaaaatcataaaccttcttatttgtagtaatatagtgctataataagaggcatagtgatgattcttctttttgctttggttttttattttgattgtgctgagtattcatacttgtttgagatgccaaggtgctgctttctcaactggcaaatgttttagaataggaaaacctttgctcacaacattttccctgcaggctactttaaattttgccttgaatctcaaagcctatgtaacattgtatcaaagcaactcgttttatgcatctgtgttggtcattaatgctgtttgccaaatagtttttgttctcatccttcatgttaggggctgtgactaattctggccaataaatgagttgtgagaaaaacagatgtttgaaaggaaattgtgcatcctaatattgctgcagtatttaagttccagtatgagatcttcaargctgtcttttttttttcttcttccgttctcagatcctgaggcaacattttgaggtgctattccccctgagttaaaaaagacctgtcaggctgggctcggtagctcatgcctgtaatcccagcactttgggaggctgaggtgggtggatcaccygaggtcaggagtttgagaccagcctgccatcatgaagaaaccctgtctctactaaaaatataaaattagscaggtgtggttgtgcatgtttgtaatcccagctacccgggaggccgaggcaggagactctcttgaacccgggaggtagaggttacggtaagctgagatcgtgccattgcactccagcctgggtaacaagagtgaaattccgtgcccctcccccccaccaaaagaaagacctgtcaataaggaatggacagcctgaagaagtaaattttattttaagccagagattttatggttctttgtgtagctacataacctggcttaccttgaccgagtatttttttcttgttagattctgagacttagataagagtattattattataatagtatgggtatttcagaaatacttagataaaagtcaaggataagggaaagttaagatacatggtattgaacaattagcatttttgagttttactttcttgcccttattgttttttctctttttttcattgttcttaattttcttttatgttttgtttccatagtctaactggtgargtaatcacgatcaatagtaacttgaactgaagaatggttttgttccagtatatgtttctgcttatagtcactgaaaagtttctcrtctattccaaagccctgcttctgtgcaaatttagttcctactacatcaagaaaggaattttaaggatcagaactacagaaacattcagttgatttctttgacctgttgaacactgttctgacatttcaagtagtgaatgttttgtaatgaatgagtcttttgtaatctttgtgaaataatttgtaaaatttcgttaattgatcttttgtcaatattaatgcaagttagagaaaaatgttctttactggyactgtgtaattgaaatcagttacaaagaatattcttagtatgcaaacttaagtatatacatttgcaaaggagaattttatttaaaaaaagtgattgatgtagtttctttactgtgaaaagaaaaatgttttcctgtttttaaggtgacttgttttttyagtcccctcctctcatatgaattccttcataaaatctatgatgtttggtaaagtaattgatcagctgtcttaatatatatatatgtgtgttgtgtgtatttttagggctggaaattgatttttaatgataaagtacagtggacagcacagagggggctaagccaaactgtctgggatgctgtggtggcaatgagctggccacacaaactgctgctgctgctgcttctaggtggctgccttgctggtgaggtccttgccttctctgtagctgccagtgccatctcctttgcctgctccttggcttccttggctgtctcaacaagtgttttagaaggggccttgcatttcatctttgccaagatatattcaaaacccttcatagtcttggtcacgttgcttttgaactgggcaagaccaaattcctggacacttctggagacaccaaataagctagaggagacccaggcttctctgcggatttcggtccagccactgttgttagagttcatacagtaaacacactgtttctccaccaccatcagccgggcatggttgatgttccaggtgaaggtggtcatggtctgattctgtgggtccacaatagagtcctccaggatgtacactgaatgaagaacattggcaggaaacagttgcttggcccagtgggacatcctgttggtcttggtcaggagttgctgggacagcagtttctggtcagcagtcacctcccggtgtactgtgtcttccgtcaagacatgtttgctatagggatttgggtactgatgccagaaggcggtgaacacttggtcccaggaactctggagcacgccctggcccaggaaatacttcaccatcgtcccggctggagtgggctccagagttcctgggaccaggtgttcaccgccttctgggagacacgcggggaccggagctcggcgaacacccgccgccaggctcgtagctcagtcaccactgcaccatgcccaagcagctgctgccgccaccgccatgagttgtccgctgtcttaatatatcttaaaagagttgtgtatagcaaatgctgttataagtgtggacggcattacttacatacacaaaccacattataaaccatgatacttatttttaacgaggatgtcttaaagttatttttaaatctgtgctttttaaggaaataatcgaagcaaagggaatgttaaaacatctgattagttagttttatacttgatgataaagtgtatttttaactatgctaaatcagtaatggagtcatgaagccaagtacattactaattttctatctttttctcttttggagaaaatattatcttacactagatactcagagtaagacttctaaaactagtggtgaaaaggaaaaaacttcatatatttcattttctttcttgtgaaatgagattttcataaggatagtaagtaacctgtggctaaggtatgtgttggggatgattccattgtcttttttttttgagacggagtctcccaggctggagtgcaatggcgcgatcttggctcactgcaacttccgcctcctgggttcaggtgattctcctgcctcagcctcctgggtagctgagattacaggcgcgcaccaccacgcccagctaatttttgtattttcagtagagacggggtttcaccatgttggtcaggctagtctcaaactcctgacatcgtgatccacctgccttggcctcccaaagtgtcattgtctttttatatttactgtgtagtagtaatacagtctcttacgtttaagaattttttttttaatagatagggttttgctctgtagcccagacttaagtgcagtggtattcatagctcactgcagccttgaactcctgggccccaaggatcctgtgaggactaccagtatgcaccaccacacctggctaatttttaaatttttttgtagagagagggtgggtgttgctgtattgcccaggctggtctcaaacctctggcctcaagcaattcttctgccttggcctcccaaagtgctggaattacaatcgtgagccaccaggcctggcaagaaattcttaaatgcattgtgtcacatccttttacatcttaccgaaaaataaatataraagaacaatatagaaaaataatgcctacaaaaatgtcttaaaatttgtttttaaacttatgcctgtgtatgtgttttccctaacttacatagtaaacattgacattcagtagggctgtgtccttggcctttgcatatctccaaattcaagaacactcacatagaatatatttccgttgaggggaatgtatttgcagagtattcggtcatataaaatgtttaattattgtttcaacttttgtgtttttattttgaaacagggtgttgctctgtttcccaggccggagtgcagtggtgcaatcttggctcactgccaccttctcctcctgggcctaagcagtcctcccaccttagcctcccaagtagctgggatacaggtgtgcacaaccatgcctggctaattttttttattttttgtagagatgggatctcgccatgttacccaccctggtcttgaactcctgggctcaagcgatctgcctgtcttggcctcccaaagtcctgggattagagacatgagccactgcgcccagacttttcagttttgactgagattttatttgtcatgtgatawgcagtttggacatggtttagagaattcacaggagcagtttcatcactccttatttctttgtagattgtatagagacttttaatctcataagatctaaactaccactgaattttttactgtgttttaaaattcacctaaaaattttggctttctggcctcccctgcatgcctgactatatcaaaattcagttttaaaattttttataatttaaggatatagtattaatagcttcatgtcagtttaaaggaaatatattatttgcagttgttcaaaattttatctgtatttatacctatattttacttcagggttcccatcttttccacttttatttttttcccagaaaataaggtgaatttctaaaattagaaatagcagttaagtagttagtgcctgtgtcctgtagttctaggtgtttatgtgtaatagagtagaaattatggaaagatattttcaagctggtaagttggtgagcggccacagttaaaagctgaagggttgartgtttcagcatgagaaatagtggcgggaggatttctaacttactcattgattgtgttcagttctgaaaaagttttcttgatgtcccattgcagatttgaatgtggtcttataataccccaaatgtatcatcacttttatttctctgagtaaagaaaatctggtgtcgagagtttgcttttgctgattgagcagtttatacttttttctcaagaaattgtaataccttttatcatgatgttcaggtctgaatgatagatccagattatttaaaataatgggttttgggccaagcatggtggctcacacctgtaatcccagctacttgggaggctgaggtaggaggattgcttgagcccaggaggtcgaggctgcagtgagccacagtcgcatcattgtactccagcacaggcaacagaatgagacccggtctcaaaaagaaaaaaaaaaaaaaaaaaaaagaaataataatggtttttgtgtaagttaaagatgatgttgagcaagccactttaaaacaacactgatttttccatataaacaatagttttatatgaagaagtgtcattttgtttttcatttcaaaaatacaggccatgtgcagtggctcatgcctgtaatcccatcactttgggaggccatggcaggggtattgcttgagatcaggagttcaagaccagcgtgggcaatatggcgagacactgtctctacttaaaaaaaaaaaaaaaagctgggtatggtgatttgtacctgtagtcccagctgctactcaggaggctgaggtgcaggaggtttacaccttcagtcacttcagtccatgaggttacagtgaaccacgataatgctgacagtaagatcttgtctctaaaaatccattttttaattaaaaaaatacacacaatcatatgtctgacaatggtttaatatgcagaatatataaagaacttctaaaacttgaacaacaggaaaacaacccaattttaaaatgggaaaagggcttgaatagaaattgctacaaagatatgaaaatggccattaaacataaggcaagatcgtcagtatctttacgcaaatgtaaatcaaaaccactgtgagattcaaacttactaatatgactataatttttttaaaaaatacaaaacctggaaaacatcaagtgttggagaggattggagaaattggaaccttcatacattgatgatgggaacgtaaaatggtttagccactgttgaaagcagcttggcaattcctcgaaaagctaaacatggaattaccatatgactcagcaatttcaattctacatatttatccaaaagaactgaaagactcaaacagatacttgtatgccagtaccattattcaaaatagacaaaaggcagaaataacccaaatgtccagcaacagaggaattgataaataaagtgaggtggctatataatacagtggaatatcattggtgcctaaaaaggaagttctgaggcatgatacaacatatggataatccttaaaaacactatactatgtgaagtaagccagacacaaaaggacagatatattattccacttaaatctagaataggcaaattcatagagacagtaaattagtgattaccaggggatggggggagatgagaatgaggagttattgcttaatggatgcagagttcctatttgggatgatgaaaaagttttgggccaggtgcggtgcctcacgcctgtaatcccagcagtttggaaggctgaggtgggcatatcaccagaggtcaggagtttaagaacagcctggctaacatggtgaaaccccgtttctatgaaaaatacaaaaattagctgggtgtggtggcacatgcttgtaatcccagctactcaggaggctgaggctggagaattgcttgaacccaggaggcaaagtttgcagtgagccgatatcgtgccattgcactccagcctgggtgacaagagcgaaaactcagtctcaaaaaaaaaaagaaaaaaaaaaagttttggtaacagtggcgacagttgcatagggtgtgaagttattttagtgcccttaaattatacatttaaaaatggttaaattaactttatattatacatcttatcacaatttttgtaaaaagtacatgtgaataccttttcactaaactgccctctcgttagtatggaatggcaaaggctatatcatccatttgaatattttctgtgcccatgatttaaactttcccaagttccactatttatttttgtggtaatcaaattcaggaagcatattattgccctcatgctctctacgcaaaaagtagcatatagtttggaagtccagtacgtttaatgttcattgagtgggtctacagtagagactcctgctttgaatatatatgattagaattaatgttctgaagaaaagtgcttgggctgagtagaaaatataagatattccagatggaggaaatcttgtmagcagaagtgtgaaaaaggtaaaatagatctattatttgccatattaacatgagcaaatggcaagtgttcttttttttatttttaaatgagacatgagacagagtcctgctctgttgcccaggctggagtgcagttggctcactgcaaccccgcctcctgggttcaagcgattctcctgcctcagcctcccaagtagctgggattacaggcgcacaccaccacacatggctgatttttgtatttttagtagaactggggtttcaccatgttgaccaggctggtcttgaattaccaacctcaggtgatccacccacctcgatcttccaaagtgctgggtttacaagtgtgagccgctgcgcccagccccttcttttaaaatacacattgtttttataataaatggtgtctctctcttctatgatctcaaaaaatgtttcattgtatttttatctttaaatttaacaccttgtatttttaatcttttaaaaagtgaaacgggactgtattagtttgctagggttgctatagcaaaatatcatagacaggtagcttaaaaacagaaattaattttctcacagttctggaggccacaaattcaagatcacagtgtcatcagggttggtttctagtgtgggctctcttcctgggttgcagaaagctgctttcttgccatgtcctcacatggccttctcttgtgtatgacagggtaagagaagcaaagaggaagtgaagctctgatatttcttcctcttaaaagtactccagtcttaatcagatttcacttcagggtctcacccatatgatctcatttattcttaattatctccttaaaggtcctatctgcaaatatagtcagacacatcaggggttaggacttcaatatattaattggggggaaggagcacagcagttcaaaataataacaaaaagtacacaaagtacaaatgtacaactcaactaatcattctgaagagcacctgtgtaactatcccccaggtcaagaactagaatattgccagcactccagaacctccaccagttcaacttcccaatcatcacaaatctcttcttctacctagagataattgccaactttatggcaataattttcttgctttgctctatatagttttgccatcttaagtttacatcttttttttgagacggagtttcactcttcttgcccaggctggagtgcaatggggcgatctcggctcacctcaacctccgcctcccggattcaagcaattctcctgcctcagcctcccgcgtagttgggattacaggcatgagccaccacgcccggctaattttgtatttttagtagagatggggtttcaccatgttagtcaggctggtctcgaactccygacctcagatgatccacctgccttggcctcccattgtgttgggattacaagcgtgagccaccacacctggcctgagtttgcatcttataagcaatgtctaagatctgctgcagtgtgtttttcatttttttgtcttgttgggatttttttagtctcaccagaaagttatcagtttcaataatattttcaaaaatgcatgttttggttttttggtctccattatacaatgtttgttttgtactttgttgattttgtttgttttgtactttgttgttttctgctctgctctttattttctttccttttactttcttagagtttgtctgttttgcagttctctttctaattttgtcaggtgttcttaactaattctttctttcccagcctcctttttttttttttttttttttgagactgggtctcgttttgttayccaggctggggcaaagatggctcattgcctcctcagattcccgggctcaagtgatcctcctgcctcagaccctgccccgcgccccccaccccccatgtagctgggactaaaggcgtgtgccaccatgcctggctaatttttgtattttatgtgaagacggggttttgccatgttgtccaggctggtcttgaactacaaagttcaagcgatctatgctacacctgcctctgcctcccaaactgctgggattacagaatgtgagcccccatgcccagcccttttttagtctttaaatgggccttaaagacccatttgagcctttagattttcccctttattcttacactgtgttcacaaattttcatatgtggtacttttgttggcatttagttttacagaaatacttacaaattttgttgtttattgattctgctggtttttcttcatgtcaccttattttctcatgtacttgtttatctgtgattgtgtgctgggcccttcatttgaaaaattagttgtagaaataacttaatgtctggggtgatttttttttttttgagacagcgtctcctctgttgcccaggctggagtgcagtggcgtgatctcggctcactgcagcttctgcctcccgggttcaagcaattctcctgcctcagcctcttgagtagctgggactccaggcgcgcgccatcatgcccggctaattattgtatttttaatagagacggggtttcaccatattggccaggctgctctcaaactcctgaccttgtgatctgcccaccttggcctctcaaagtgctgggattacaggtgtgagccaccgcgcctggcctttttttttttttttttttttatttcatggaggatttgtatttctttcatccaggtgcctggtgatagggattgtctgattaactatccttttcttagtgtgatttgagattttctaagccaccttgattactcaaagctggactgcagaccataaaggaactgacttaattctgggttacttttgctcccaggawatagcytttctgaattctaactcaatcagggtctttacctttgttggaaccctagatttggacttttttagatctattctgtagaagccaccaagtctatttcttggcctttcaaccccaggacaaaagtagctgacagtgctttgcttatttctctccctgggtttctcaccttttcaggtcttggctcagtagttcttgtctgttttattagtacatggcttaaaacccccaaacttaaagtatatcttatctatatatwtttttkttttcgagacagagtcttgctctgtcgcccaggctggagtgcaatggtgtgatcttggcttactgcaacctccgcctcctgggttcaagccattctcctgcctcagactctcgagtagctggaattacaggcgcctgccaccatgcccagctaatttttgtattttttagtagagatgaggtttcaccatgttggtcaggctggtctcgaactcctgacctcaggtgattgaccctcctcggcctcccaaagtactaggattacagacaggagtcactgtgtctggtccttatctagatttttttttttttttttgagatggagtctcactctgttgcccaggttggagtgcagtggtgtgatctcggctcactgccacctccgtctcctgggttcaggcgattctcctgcctcagccttctgagtagctggggctacaggcgcgtgccaccatgcctggctaatttttgtatttttggtacagacagagtttcactatattggccaggctggtctcgaactcctgacctcgtgatcccctgcctcggcctcccaaaatgctgggattacaggcatgaaccaccatgccaggccccttatctagatttttaatggtcatgggaatgtttgatgctgttctcaaatatacgggaagcagaaaccccccccacatgatattttaattatttgtttatatgtctgtcctttcagtagggtggccttttaaatttatttttagtatttctctgctgtaagccttttattgtttgtaactcagcacctgataatgtctgatacataagtgcatagaaaatattaactggttttggcatggctttaagaaaaaattgtgaaggtatcctttcctttgagccataaaggaaaattgagattaaatctaattgttttatttgttgtaccttcagtaccagacataataaatttggatgttagtggcagtggaaaatcatgggataatttctgaataaccacttagtgcctcttaaatgtggttaaagggaagattaatttcaaaactgtatgcaggatagatgagatattttgtcaggatgcattttataagtattctatagtatggtaatttttaaagtgtggtccccagaccaggtagcattggcattacttgggattttgtttgaaatgcaaattatctgatcctgcctcagatcttctgaatgagaaactatagtagtatggctaagcagtttgctttaaaagccctcaattaggttctgatgcatacctaaattattgagctactgctgtaacacaataaaacagaatatgattttgatttaggccccttaaaagctaaaggttatttatctttctatgatgagaatatttttggaaaatatttaacgyagtctcaatgttgatctttctttagaattaagttttaagcctctataaagtcattaggtttattagagcaaaattatgacctgaaatagttgagttcgttgaaaaataaaaacttgtctatgttacacaggaaaatgataccagtctaattgttgacaataactggcttattccagttgccttgcagtgttccttaagggagtggattgtttaggacctaactttcttaatacaagtttcattagaagtaaattctctattttttcattgtttggaaggaaatatttaacatatacaatatgatggaacttctgtagaatatagcataatcacagagacagttgtatccatccatttcctagtcagtttcaccatatttttaaatgaggcacaagattactgtgttatcaaaatgttaacattaagctttttaacaagtctgtgtagtcacttgatttttcagattttgcccactaattttatgagggccattgggcaaagtgttttaatccagaatttaaaattgttcatttgtaattgggcaggcttataaaaaggggcatattttaaatctttatcatcactttatagccataatatacatactaaaagtttggtagcaatttgagtatttaactacatagggtggtactttgaaggaaaaagcattttaagttgagctttaatttaatttctgcttttaaaaacccaatatagtagtacgtcatctatgtatgtacattgagcatgcttcttaacatatttaacttccaattctttgataaccggttgcattcaattacttgtttaaataattgggcaagtttcctgagttgtaggctgtgaaatattttcaagatggtttgggtaaaaaattttttcaaagtaggtgccgtcagtgactttgatcacagagaaatcagtatgatcctgtgacaagtttagttttaacaatgtaacttcttgtgtaaactcagtcacctagtaatgtgaattagttgcaaagtgattctgtattcttagtgacccactgttagatgttttcagactagtaaatgataaatatttattgttaaaatcatccttaaaattttatttgaacatgcagcactttttgcagtgtgaaattgaaaaatcaattgtttagtttttaccaaaggaaaattagagttttgtatacatatttgatgaatacagtaaacaggttaaaatttagcaaatagaattttgtaagcatttttaaaatgtgtgaattctgtgataagggggtggctttgctacaatttattacaaagctaagttatatttcattacttatgtaaaatagtgttctttgtttagcttcttaaagtggtaggagaattgtataattccattgattggttccatgcagtggaaatctgacctttagcagatgtttgagaaattgccagcacagcatgatcagccaaaaagacagttttccccttgttacttgacaggcctttcatgctttagtaacatgccaaagaaatgtttaaattatttttttataatatcacatgctctctaaaatattaagaatacattgaaaaacatgcataaaatgagatagatttttcctgcaattacggattgcaattcagctgacttttaaatgtttattattaaaaaaaaaaaactaagataaatgctgattgttttgtgaattatgtgttactttgagatttaaaatgtcttcggctatgtagttaattgttattagggtttgatgtgtgttattttttccatgatcatgttttccatgatcatgtataacaatttaaacactgttataagtttctcttattttagtgttatttaatcgcaagtatcgtctttggttggcttttttattttttaatagaggctttttgataggggttaaatgcatcacagagaagttatcctatctggaacttctcgctaagggcaggatactgcatgaatccactttaaagcctcttctctgaaggacagtatttctttagagaatgaaatgggttcagctgtgtagttgtgggggttcagctgtgtagttgtgggagttcagcaaaaacactgtaagctctgttttcttcaacttcatggattgagcgtacaggaaggggaaggagttgccttaatgtttaagaatgaagtgatgaattgatagtatcagcagttgccagactgtatctttttctgcaggtgcttattttctgtagggcattgcagttgtttttcattgtgttaggttatgagacgattttaaggaaaatttaaggaacatgatcttacatagtttcattttacagttttgtaactgttttgtatgtcttaggtttatatactgaattagttcttccagaggattatgattgaaagttttggctgtgtgtacctatcaccttacaaaaataaaaagatttttttaaaggtcatgttcagtatcagtagttctaagaatatgctaaattaaaatttaaaaatcaaacacctataataaagttttgctgaatccacatgaattgaactaatggtttgtaataccagttatattacaagtgagaactagtttcatattttgatatataaaagctttgaaggaagcataattgataactgtttattaatatcacataatagttaatctttcatattggtactttctgataaggttttattagatggagaagggttatataatttagtaaactggcagcttttaaaaaatgaataatgacactaaaatttaaagatttaatcataatgaggtatatctgatacgtagtacctgtgatattatatattaatagtaaagtcattttatataaggaaaaattttattcttaagtggggttttctaagtaactatatgtttacacaaagtcatactgttaacatttagtcacttccagagtcagtggagttgtatcctgaagaggattaaattgcaaagttggcacagcacataaagcaaaaatgcacttaaattcagttcacttttaaggccttgttgggaataccaacctattgtttgtcagttcatccaggacagtttttttttttttctctagtgttggaataatttttttttttttttgagatagagtcttgctgtatcgcccaggctggagtgcagtggcctgatctcagctcactgcagcctctgcctcctgggttcaagtgattctcctgtctcagccacccgagtagctgggtctacaggcacctgccaccacacccggtgagttttgttgttgttgttgttgttatttttagcaaagaaagatgaagtttcaccatgttggccaggctggtcttgaattcctgacctcaagtgattcaccctcctcagcctcccaaagtgttgggattacaggcatcatctactgtgcccggagcagaataaatttttaatatatattttgataggctgattttcttgcatctcgatttttcttgtatgtcagtaactggaatcacagttaccttttgagcacggtgctcacattatgagagttgagaaaattacggggaacaaactctggccttatggtgattctggttagacttgagatctctaaattgatatttttaaatgagaatatataatacacagactaaaatatacattttaaggttaaaaaaagagaaactgtttactaagaatgtttagtagattcagttttcttagtgtttaatactagaaaatacacagtattggctgggtgcgtggctcatgcctgtgatcccagcactttgggaggccgaggcaggcagatcacgaggtcaggagatcgagaccatcctggttaacacagtaaaaccctgtctgtactaaaaatacaaaaaattagctgggcgtgttggcggacacctgcagtcccagctactcgggaggctgaggcaggagaatggcatgaacccaggaggtggggcttgcagtgagccaagatcgcaccactgcactccagcctggtcgacagtgcaagactccgtgtcaaaaaaaaaaaaaaaaaaagtattgatagcatacttttaagaaatccaaatgtctttgtaaaagtaggtatttttcattctttcagtatcagttactcttcactatggttctttttcacatttaaatagaatcaaggaaccttttatctttggtttatctggtatttttcagtgttagcaattttgaaattctctaatttttaccacaaacatttttgactctttcattcagcttataatctgaattgacagaaaaatccagggagaaaagttaaaatacttcctaaagttaaaatatttgctttatttagatttctagtatttcttatcaaggaaaaaaatactttttcattatcttatcgcttgataaccgttttttgtctcagctaaayggaagaaaagttacctggcagcataagatagctatgaagaatctttcccccaccagaaagaagtttagcaaactattttactgaataaatctaagacttcctccttcccagtagttgcccacaattttcctccaatatgagattatgtctctattttgtaattctgctcagaaaacctgtcttaaaatctacacatattaaactataatatgtcataaattttaagaatgttatttaacagaggtaaatttatcatgaataccatatatttaaggtagcaaaacataaagagagtaataacctcttttgatactcaacagcagaccaggtaaagtccaaacagttctgtctcatcaaaataatgaaggttgcttgtctttgacctcttttcctgttacctctttaagagataacacacatatacatacgcttttgtagatgagaccattctaaaatttataaattgtgttgtatatctttgtctgcctgattaaaatggcttgtcttaaggtaacactgaactgcttagtctttcaataggaatttatttagcaactactttgtggtattgttttgatatactctatttttgtgtttcggctttttcttatttattttaattaaatcaatatcatccctcgtatacactattcttctgtgcagttgacacttgaacaatgtgggtttgaactttgagagtcaatttatatgcagatacttttaaataaatatattgcaaaatattttagagatttgcagcaatttgaaaaaactcatagatgaaccatgtagcctagaaatatttttaaaaatttagaaaatsttaggtatgtcataaatgcataaaatatatgtacatcttagttttatcatttgctaccataaaatatacacaaatctatttaaaaagttaaaatatcagaactttacccacacagagacgtgacatggcactatttacagtagagagaaatataaacaaacataaagatgcagtattaactcataactacataaaattaactttagtacatgctgtgatagrtttttagccacctcctgtttttactgtgttgaactcaaatgttgcgaatgtctgcttaaaactcagtgtgatgctgacatctccatgtgagtagttgacctctccactaaataccatattgcaataagaaatgatctctcgcagtccttgcataatttttaatgttgtttagtgcaatctcgcaaacttcgaatgataccatagaacagaaatttaggaatcaataagtacagtactgtaaatgtattttctcttgctcataataacttctctagcttactttactgtaagaatacagtatataatagacatacaaaatatttgttaattgactttatgtcattgttaagacttcyggtcaacagtaggctattaccagttaattttatggggagtcaaaaattacattcagcttttcgactgggcgggctgtcctcagtcccaacccctgaattgttccagggtcagttgtacatagctcttcatgtttttaaaaaacacatttttggctgggcatggtggttcaagcctgtaatcccagcactttgggaggctgaggtgggcaaatagctggagctcaggagttctcaggagttcaagagcagtctgggcaacatggccaagatcttgtctctatttaaaaaaaaaaaaaaaaaaaaaaattgggccaggcgctgtggcttacgcctgtaatcccagcactttgggaggccaaggtaggtgggatcatgaggtcaggagatcgaggccatactggctaacatggtgaaaccctgtctctactaaaaatacaaaaacttagctgggcatggtggcacgcacctgtagtcccagctacttaggaggctgaggcaggagaatcacttgaacccaggagttggaggttacagtgagccaaagttgtgccactgcactccagcctggacaacagagtaacactccgcctcaaaaaaaaaaaaaaaaaaatcaggccgagtgtggtggctcacgcctgtaatcccagcactctgggaggcccaggcaggcggatcacctgaggtcaggagttcgagaccagcctgaccaacatggtgaaaactcgtttctactaaaagtacaaaaattagccggacatggtggtgggcacctgtaatcccagctattcaggaggctgaggcaggagaatcgcttgaccccgggaggcggaggttgcagtgagccaagattgggccacctactccagcctgggtgacaagagcgagactccgtctcaaaaaaaaaaaaaaaaaaaaaaatcagtgacacatttgtatctactcatgtaactaccatgtttctcactcactgtagttaacctggtacctctacccagtctataccgcccctctgttccactgatctcagttctatcaccaaagatgagattttcctgttgttgaacttaatataactggaatcattcagtggctttttacactcagtataatatctgtgaaacttaatatattagattcctagggctgccataacatcacaacaaatttggtggatggaaacaacagaagtttattctttcattgctctgaggaccaaaagtccaaaacttcttcattaaatgggacatagactgattagtaacaagatttacttgtctttctccatggtttcaacagtgaaaagtagttttaatgttgactgaaagttgattagtgcttaagacctgaaaatgcttaggattgtttgctgttggaagatacggctcttatctacttttctccattagagctctggagttctcttgggcctagaaagaagtaatttggaacagttagtgtagtgtggggtattatgaaaaccaaaatagagtattataataaaatatataataaaaacatacataaaattactggtttgggctcagtatattttttgtctttaaaaagaagatgctaactcaaggaaagggtaataaggtatgctggaaagtttatttgcttagaagttaggactgatttctggtcctggctctgtcattaataattatgtctctggattcttatggaaggtttttccagttcttcatatgacagcttggtattagcagtggtcctgacatttatagatattatcactttctttcacctcactcactcttcatttccttcacagtattaacagtaaccttttctgttacattttgttaactttagaaatagtagatcatgttagactaagtagagatcacaaaaagatgagatttaggagaaatccatagatgttttgaactgtggatgaatagttcaccaactatttcctgtacacaaaagccatgcaatatatgtgattaaatttgtgccttggtgaaataatatgttatatgtcactgtatgtattgtggggtcatttataaatggttacaatattttaaagtaggaatacctagggtctgcttgtcgttagttttctgtgatagatattcgacagtgcttcctggcatttaggaaggggcagtgagatcttttaatacatctagagaagacacttccttatatgatcttttcatttattcaaatatatatttattacttcctctgtgccaggtactgtgtggctgagcagcctagacttgattctgtaaaggaaattaaaaatcccaggacccccagactccttatgcaaaaggaaagttaatcctggagtctgagtcatgcaacacactctttcaagtgagtagctgttactaacattatgccttaaccagatcctcatgtaaaagtaaaagacctcaggcatctatgaaagacttcccctacagatcactgaaaagcaaatgcttcgctggtctcccacaaacagatacatgccaattgtaactttaggtgtacaatctaagtgaagctcctaaaactaaggtctgttctgtgccacactgataatgtcatttacaatcttaccttctcagatgcagaacagagacaagaatagtcattcttccactgacccagagatgtctgcagaattgatttttcctttactctgtttttccttcattcacctaatattatgtaaaatatagtttttactagataccaattaaaatctcacaggaatttaaccattcacgttactgcctacctgtccctcttcctacatgcctgccccgctttaaggaaacacataaataggaaacctcctgaaaatctctttggaaaaacagttacatatgtgttggtttttcctggatgggccctaaagctggcttaataaaccttgattggttgagactgtggcctcagtcactcattttggttgccagttccatccctcccagaattttctgtgtatggaagttgttttatgtatgtagtaagatgtcaattacgagtggtttgtaatgactgtgcttttgaaatggtagtacttattaaacattagtaatttgagaaattaacctgcatgagacttaagagagaacattaaagtaaacatttaaaagttttatttctaaaatgtcaacacaatttttggttagctacttagtatatgttgacttttaatttcttggaaaatactatttttttggaattaatgatatgtacttgccactgattaatcagatactccctaagttacgtaaaatcatttcagtacattcaggtttgtatattaggtatcctgtcaattttatcttctttatgaaatctttcctcaggcctttatatctgtactggccctccaggcctcttgattttatgtgactatcatcttggtgatttccttgactcacttttgctggattcttttcgtggatttcttgtcttagtttattctcttgtatcgatggagtatatcttactcctttaaaaaaaaaaaaaccaccctacatttaggatatacttgatggcccgttcatctgaaaatatcttaattctactctcaaacttgactcagacctgactggatatagaattctagatgaaaaattagaaatgatttttcctcagaatttgggaagcattaatcagtgacttccagattctgaatttgcttttaaaaagtcagatgttgttctggtttttgatcttttatataaaagaaacttgtgggatcttttcttgtgtctctgcttggamatttcacaataactttcctagatgtacattgatttttatctgttttttttttctgagacagttttgctcctgtggcccaggctggagtgcaatggcgcgatctcggcttactgcaaccttcgcctcccaggttcaagcgattctcctgcctcagccttccgaataactgggattacaggcgcccgcctccacgcccagctaattttttgtatttttagtagagagggggtttcaccgtgttagccaggatggtcttgatctcctgacctcgtgatccacctgcctcggcctcccatagtgctgggattacaggcatgagccactgcaccaggtgatttttatctgttgtgcttagcttttgaggagttgcttttcagttttgaaatttatgagtgttagttctgaaaagtttttctgaattgtttctaagattctcttttttctctgttatgtttctcttttctgaaacttgtgttgggatattgaaccacactgattctgtttttccctttgtctcctatatcctttatgttctacttggaaaaattttcagcttccttttctaaacctattgtattttttatttctgctatcataatttaatttgctaaagatttttttctgtttttttttttgtttgtttctccagattgttgtattttgatagcatccttttgcttttgattatggtattttcctcttacctcattcagaatattctttttttttttaatgttttgttttcttctctttggtctattttcttcctgtcatttttccctatgtatattttagtctctgtattttatgtctaatgttttcttcaaatgaaattcctgacaattctttcagactacttgtatgtaatagagtaacactaaaaaagtacattggaaactctgagcatgtgggtggactttgttggatgtcatcttatctatttgagatctgctcatttccataggggaatacctaatgtctgtatatttagatttttttaaagtggttaggtttccaaagaaatctgtcagtgctttatctggctttcagagttatgccctatgaggaaagaagactgaggatgaaaggagggtctagtcctagacatatttcattatgtcagctttcacttaatccttcttctgtttcaatggtaatctctgccctcaacctgttttaatatgcttcttggtccagggaccctttcataaccttttctaagaaataaacctttttttcgtaccataatgggaaaggagacagttgctaggctagagtcagggagaaatctgagagtctagctgctgcttcagtagactatggtcagtcttcctgttagccctactttacccctactcaatttttgaacctttggggcatagcttatctttggtaatttagcatattaatcagctttccctaatatttggctttagattaagcttstttttttttccactaagttagctaccactggttttgctgttattttaaaattagtttattttacccatcttttcaatctgttgaaaccttacaatcctcatcatccagcatgttaattattattctttgagtcctacattcatttcacaatttgacttttgtaagtgtcttgactgaagtgtaatgatagagccctgtggaatatatttgaagacattttatcaattttactttagttcttggttaatattataagttatggttgtttattccagctatcagtacctgcttgtgctgtattattgagtttttatttttttattttattcctaagaatattttcaggatattttcccatactattttgcttaaaaaaaaatctagtgttggattagttatactagcctacctaaaaagaagaaatttattgataataaaaatttaacatcacttgtagggaaataaaattacctcttggtgtagccttttttctttttttatgcctttaaaccatcttacaaataaaaacttctggactttgatatggacacatattgatggattattaaacttttacacttgaaacttctgtgattgtttgatacatattttctaggaaacgtttttcttcatgtccaaaattgcttattagaaactgttctcttccagtattgttttccacacattggagatgcatacatgcctaattccgacctgtgattagttaagctccacagaaaaaaactaaatttaaaagtgactagatattctctgtcttcttatttgctcttcatttactttttaactatgtttcttctaccttttccagttttttattcaattctccttagtggagaagatggatacaaagcaggaggtgtgagtagttgtttattttgtctgcatctgttaatattacaccatctttcccatgtaatattcttgtttcttcttagtttagcctcctgaatttatgcaggcaatgggcttgtttggttttcctttgtrttacttataaaatgtagtttgttctgataacgttcttataagattgatgatattaatctgtatatatgcatatttgtttctctcctgttatatatatgtcctttaaaaattggacaccagaaactatgtagcctcattgttttactcatccccttcatttattcagtccactgacagtaagttcctaatgtatgtcaggccctgagaaatcaaatattgatattactttttactactagagttactactttcacaggaaatgtctgctgcattttcttattagaattattgacatctatagaattaaaaaatacatcttttgcttttttgtctcccatccatattgtcaagtactgtttccttttaaatgtacatgtggggctgggcgctgtggctcatgcctgtaatccccgcactttgggagactgaggtgggtggatcactcaagcccagaagtttgagaccagcctggccaacgtggtgaaacgtcgtctgtattaaaaatacaaaaaaattagctgagcttggtggcgcacacctgtaatcccagctacttgggaggctgaggcatgagaatcgcttgagctttggaggcagaggttgcagtgagctgagatcatgccactgtactccagcatggacaacagagcaagactccatctcaaaaaaaaaaaaaaaaaaaaatctacatgtggtattaaagtagactcaggtttgaattctgactctcccatgtattagctgtgtaacagataaatcacttaatctttttgggtcttgagttctcatctgaaaaacatatttaatacctactttataggatttaattgagagaattgaggtgctaaaaatgaagtgagagaatgtacatacatgtgttgtataaacttcttaaatttaaaaagttatatgatggtagtatttttataaggattgctattcacatatttatccttgcactctgtttgaaatataattgtagttatccttgggagcaagaactaattgtatcatgttgatccttaaacattgcagctggtaaatagcaaagactcctactttttggattgaatttcttcagaaaatggacttagaacaagtgttaaggtagttgctatttcttttcaccccatgtactgcttttgtttcattttaaaatttaatgttaaaacattctttatatgaccaatttttgttacatatttataagttaataattgcttctctttatcctccttccctaattactatgttgtcacccttggctttatggattttagatgttttacatctctgctactcagtaacctttcttgttcagatctgtttttgaaaagataaattatacagacgtgttactatattccaatcataaatttcatttttcttcttttttcatattaagagataatttttacttcttcatgttaaaatctcaaatatatcttaatacttactgggtatgctagcacgtagctatagttattcagctactcaggaggctgaggcacaaggatcccccggagttcaggagtttaaggcctgcctgggcaacatagcaaggccctatctgtttaaaaagaaaaaaaaattagcatgtggttccactactggaatataaaaagccaagattaaaaatattagtgtgtcgtatatcttttctctctctgctttttttggtctcgtttgttttgaaatgagactggccaatttatctgttggttcttcctaaaatcaaatttgctgtttctctaaataactgcattttatgtgtccttactctttttaacgtttcattacagtgcagtcttgatcatggtgacaaatatctgtccaaatattgtctctctagtctttatgaagtacatcattcactttttttttttgagatggagtcttgctctgttgcccaggctggagtgcagtggtgcaatttcagctcactgcaacctctgcctcctgagctacagcgattctcctgcctcagtctcctgagtagctgggactacaggtgcgtgccaccataccaggctaatttttgtgttttttgttgttgttttttttgagacaagagtctcactctatcgcccaggctggagtgcagtggcgcaatctcggctcactgcaacctccgcctcctaggttcaaatgattctcctgcctcagcttcccaaagtgctggaattacaggcgtgagccaccacgcccggcctttttgtattttttagtagagatggggtttcaccatattggccaggttgatctcaaactcctgaccttgtgatccgcctgccttggcctcccaaagtggtgggattacaggtgtgagccactgcgcctggcctgtacatcattcttttaagttggaaaaaagaaaggaaaaccaatgcttaaacagcgttcgcacttaaggtctgttggttactttgttaagtccttttgttgtcatgcttaatccttaaaacagccctctgaaatactattaattttgactaacttgaaaactaaggctcaaagacattgtgttcaatgtctctggttctaattccaaagaacattgaatatgtcatttcacaagctcttatatggtattacctatgtaacttgatcatctgatgtgaagaccttaagtgattttaagtaccacctttattagattttagaaatattataagtactctttattcattgtcagtcttactaaattggtacttatctggaatgtactttggaagtttgtttctgaagttttaamaagttacacagtttggataagtaatgtacatttgagtggtaggatgacttatactagctttgggcatcccttggctttcctggtgacacttaaatttccagcttgctgacactaacctctttctcttaagaaaataaaagcagagatccagagagtggtctgtccgtctcagtttttccttaactttcttttggtttcaaacattatttcaatcatgctttccttctaccgtgatggaaaaatgagcttggtatgttttaggaataggaagaagattaccatactgatccgtagagtaagggacaagtggttgttagcaaggtcagaggagtctgcagaaaccagatcttcagggacttaactagcataaagagtttagattttattctagtaccctggaatgctaaattttaaaataaggggcatgatttgacatcttttttgaggtttttaacatgttattccacacacaaaaaggaagatttaaaaatatacccattaaactgctaaaaagtaaatcgagtggtgagaatctaacagaagtctaatttctagtatgtttattatatggttgtagttacagggactcttcctagcttaaagctggggctctggaggctattttatactttagtgcaacatgatagggaattaaagtgcagaaatgttggtttattatcacatttttctatcccaaagtggcatgaagaaaacagctacttgactgcacagcttttgggaatggggataaggcattatgatattcctaaaaacatcctgttcagatgagtgttacatatcatcaggtattaagcttctgctcatttacacagtcacaatttcatttattcaytcaacacaaaggactaacaatttttaaaaagaaaagggaaagtggaaagtttattttaacgaaatgttacaagtattcttcgtaaatgtacttactttctcattttatatgtaaattatggttttaattttttatttctctgatgatttgtgwtattgagcatttttttcatgaattttgaccattttttagccctttgtatgtttgcttttgaaaacaatcccctgcccactttttttgtttttttttytttttttttgagacggagtttgctcttgttgcccaggctggagtgcaatggcgctatctgggctcattgcaaactctgcctcccaggttcaagcgattctctttcctcagcttcccragtagctgacattacaggcatgcaccaccacgcctggctaattttgtatttttagtagagatggggtttctccatgttggtcaggctgatctcgaactcccgacctcaggtgatctgcctgcctcggcctcccaaagtgttgggattacaggcgtgagctactgtgccctgctgggtcctcttttattagggtattaattctatacatgaaggctctgctttcatgtgttagtcamctcctgaacgccccacttcttcataccatcccaatgatgactaggtttccacatacgaattttagtgggggacacaaacattcagaatataggagatatttataaaacaatccccaaagcttcataatgcacactcttttcaagtgtacgtggtggtatgttcatcaggagagaccatatgctgggccatgaaacaatcctaaatacattgaaacagacagaattaatacaagggtatattctcggaccaaaatggaattaaatttgaaatcagtaacaatacaagaggcctaggtggggggattgcatgaagccaagagttcgagaccagcctgggcaataccgtgagatcctgctctacaagcaaaaacaaaaagtacagtatctaaaaagaaacccaaatatttttacattaaacacaacaattttcgacaacctgttggccaaagtaatcacaaggaatattaagtctttttgaactgaattataatgaaaataaagcaaattagaatatgccagtgcatcttcaactggaattagagagaaatgtgcatcttcacatgcttataatagaaaagaatagaggttaaaaaaaaattgacctgaagttctaccgcaagagaggaaacgaggccgggtgcagtggctcacgcctgtagtcccagcactttgggaggccgaggcgggtgaaycacctgaggtgaagagtttgagaccagcctggccaacatggcgaaacttcgtctctactaaaaatacaaaaattagccgggtgtggtggagggcacctgtaaatccagctactcaggaggctgaagggagaactgcttgaacccgggaggcggaggttgcagtgcactccagcctggtgacaaaagtgaaactttgcctcaaaacaaaaacaacaacaacaaaaagggctggatgtggtggcttacacctttaatcccakcactttgggaggcgaaggtgggtggattgcaaggtcaggagttggagaccagcctggccaacatggtgaaaaacatagtgaaaccccgtctctactaaaagtacaaaaatcagccgggtgtggtggttgcatctgtaatctcagctactcgggaggctgaggcaggagaattgcttgaacctggaaggcagaggttgcagtgagccaaggttgtgccatggcactccagtttgagcgacagagcaggactccatctcggggccgggggaaaggcagaaaagaacaaagtaaactcaagaacaaggcaggaaataaagagcagaaatcaatgaactagaaaataagcgggaaaaaatgaaccaaactacactgagttaacaatgttcacctataaggtagtccctcacttggcttctcttccctcaatggacaacacacccaattggtgagactctagaggagaggaatggacacactcacatgttgtttattggaatgcagagtggtataacctcctataatggggttttgtcaacatcatctttgatctaggaaatcctaccttaggagtatgccttaaagatagaatggcaaaaatacaaaatgacatatgcacaaggatatattcattgcagcattatttagagtagcaaaagattgaaacaacccaaatatccatctgttagggttctgattgaataaaatggttcatgccccaagtgggatattatgtaggtataaaaatcaaaaacaataccttttaagctgtgattgctactgtacattttgttaagtaaaataataagatacagaacagtgagtaaagtaggctttttatttaagtaaatatatttgagtatgtgttcatgtgtatatctatgtttctacttttatttttttttaaaaaatggaattaacccaaaactaatttattatagggaacaggtatagaaggactagctagaattctccgaatataccttgttttctagatgtgactttgaatcaagtatgtcartattttacataatcccaaaagaagtttttgtcattaaaaaaaaaaatcctaaaaggaaaagcaaaatgaaacagaagcctaagtggcataaccataggaagaaactattttaagagtttttaacatagtgatttaattatatatgcctgggggttatacctttgtacaaaaagaatggaataaaaaccatttaatcatagtgttagtattattatttctagactgttgtatatatattgtgtgacaaagtaaatgagtttatgttgttgcataacaagattttcagtataagagaaataaaagatcaaggaggttgaaaaacagtgtagaattttatttgaaagtgtcagtatactaattctgaccactgtaaaaaggcctagaaaaggtgaccaaatcaggagtaatgagcacccctagcactctgattgttgtttctgaacactgtttcccgcagaaaagtaccagggttccttggatatatggttgatttcaggtctggggcaggaaatggacaagatgatcctgggatattttgtaataccagaatcaaagaagctattaagagattactaaggttgtatctaaaagacttaggagctaccttgaagattgtctcactgaccaaggatggaaaatttgacatcagtaagaataacaactgcagtgatttgatacgtatcacatttatttaaatccggaaagtttatgatgctttccctaaaaaacatctattgtttactgttcagggaagtcaggataccaaccgatttcaaaactcataaaaatcaaggatttattcttctttttagaaacaacctccaagaaaccaaaggtttgatgagggaattctcacttaaaatatattccagtggccaggagcggtggctcccacgtgtaatgccagcactttgggaggccaaagcatgtgaatcacacttgaggctaggagttcgagaccagcctggccaacatggtgaaaccctgtctctactaaaaatacaaaaattagctggatgtgatggcacacgcctgtaatcccaggttactcaggtggctgaggcatgagaatcgctcgaacctgggaggtggaggttgcagtgagccgagattgcgccactgccctccagcttgggtgacagagtgagagtctgtctcaaaaaaaaaaaaawwwttttttttcagatagtaaatgatgaagcaattatagttagaatatcattatttgcaaatctcagtgaattactagatttagacaattatcattggctgctgttacataaaaatataatcagacaacacatatgtgcctcttgatgaagaataccgtattatgtatgaggtagtcttttctaattatcaaccttgaatttgattaatactccagttaaacaattactggaaatacaagaatggagaaacatattttaaaatgccmcagaatagtaaaatacaggtaattgaaggctgtatgggagaaatgactttatttctttaaccaaggggaaaaagcaagaggaacctataaataatagatttaagagtcatatatggttgggtgacctggggaagcaagaaaaaaaaagtcatatcaaacagttgcaatatgtggaccttatttagatcttaacttgaacaaactgtaaaaacaagaaaaacaaacaacccaacctgggaaacttgaatactgcctgttaaataatggatagttttagagaattaatacttctttcagttaacacaaggtttgccatgagttgagaattgttgaagctggatgatgagtacctggaaatctgctgttactgtctctgtaacaaaaggttaaaaattttaaaaagaacaattaggttattttcaaaatagcattttgatattccaaagttacacattaagagactaaattgctgaataattatttatgaactttaattatttgtaactttcactctcttatggtgatgaaacattggttaaaagatcaagccagacactgtggttcatgcctgtataatcccaacattttgggaggccaaggcaggaggattgcttgagcctcagagttgaagaccagcttgggcaacatagtaggaccttgtgtctagaaaaaaataaaaaacttacctgggtgtggtggcacatgactgtatcccacctacttggacagctgaggtgggaggattgtttgagcccaggaatttgaggctgcaatgaaccgtgattgtgccactgtactccagcctgggtgacaagagtgagatcctgttcaaaaatacaataaataaaaaggtcagatcaaaataaataggccaggcacagtggctcacacctgtaatcccaacrctttgggaggccgaggcagacagatcacctgaggtcaggagttcaagaccagcctggccaacaaggagaaactccgtctctactgaaaatacaaaataagccgggtgtggtggcacatgcctgtaatcccagctattcggggggctgaggcaggagaattgcttgaacctgggaggcggaggttgtagtgagctgagattgtgccattgcactccagcctgggcgacaagagcgaaactctgtctcaaataaaataaaataaaataaagatcagttcaataaataatagttacttttgtttgaagactgtggttatttattaaatgtaagcactatagtggatccagtaagaatgaagagatcaaaacaattattaatagggtttgataggaaaaattcaatccattaatttgtcaaaatagagtgttactgaaaaaatatatacatgtaaatagtcttagaaaagctttcttcagtcatgattgtgacacttaactccagcttagacaacgagagtgagaccctgtctcaaaaaaaaaaaaaaaaaccaaaaaccagttcttcttgaacgtggctgtgatatgaaggtataaaaaatgaaaatttctatgaaactgagatgtagtttgtataccagttgttactttccttttttaaattttatactttttttttttgctgaatctaaggaagtatatcacaagacatacctaatgctctgtgcctattgtattattagtttctcttctctacaaaatagaaatattctttctaacatttccctggaaacgaatgtttctgagcttgtaaataagattccatatcctaaacttttctgggacccaagatttaccacagtttcatttagggaatactattctgttaatgctttctctttcaaccaaattcgctacattgcccgttgtatatcatctgatttgttgtgtgcacaccacatgtctttaatctcaagttggcagcgtttctatagctgctttctcacccctacttttactcctatatttgcctttttaaagcaaaaaataaaaaaggagaggtggaggtgaatatgtcagagaactaacaaggctgttcttttttatctcttaggaaatactgttcagggactaatttgtgctgtgataatggggtataagttcagtaatcttcggcccacagtgtgttaggatatagcctctgttcgagattattgtctcattcttctaccctttaacataaaaggcacgtgagatttagaatgtatagtataatctctctgtatatatatcatcattgcctttgggagaagggagtggcatgggttttttttaagtcatgctgattcccactttttaacttttttatataaattctctacttatgcatttaatttgtttttaattagagtaaaatttacttacttttaaaaatttataaattaggacaaatgcagtcttgtaaccatttcgacgattaagacatagaacagtgcaatcactcccctataaaattacttttgctaccatttctttgtagtgaaaccttcatctgtctttttttctcaactctgaacattagattttcttgtctttttcttgggtgtcgcatgaatagaattatacagtgtatagagttgagtcaggcttcttttaattatactaaaacattagaaattcatctttattgttgcatatatcaacagtttgtttattgctgagaagtatttcattatattatctgctacagtttgtcccacttcattttggggacatctgggttttttccagcttttgtctattaaaaataaaactgctttaaacattcatgtacaggtttttgtgtaaatataggttatttcacatgggtgaatatctaagtatggaattacttttcttaagtagtttatcattttgcattcccactagcatccagagttagttgctttgcatccttcccattcttttgggcagttttaaaaattttagtcattcttttttttgagacagagtctccctctgttgcacatgctggagttcagtggcgcgatcttggctcactgtaaactccgcctcctgggttcacgccattctcctgcctcagcctcctgagtagctaggactacaggcatccgccaccacacccggctaattttttgtatttttagtagagacggggtttcaccatgttagtcaggatggtctcaatctcctgacctcctgatctgcttgccttggcctcccaaagtgctgggattacaggcatgagccgctgcacctggccaaaaattttagtctttctaatagatgtgtagtagtagctcattgtggtctttatttgtatttctctaattaytaatgatttttaatatcttttgatgtgcttacttgctgcctgtatgtcttctttagtgaagtacatgttcaaatcttttgcccatatttttgaattaattttcttttattgagtttcaaaagtgttttatatattcttgatacaagtcttttgtgaaatacgtgatttgtaagtatttccttacagtctgtggcttgttttcattttttttaacattgattttcacagagtaaaacgtttccaattttgatggcatctaacatcacttttttttttttttgtgatggagtttcactcttgttgcccaggctagagtgcaatggcgtgatctccgctcactgcaacctccacctcccaggttcaagcgattctcctgcctcagcctcccaagtagctgggattgcaggcatgcgccaccaagcctgactgattttgtattattagtagacacagggtttctccatgttggttaggctggtctcgaactcccaacctcaggtgatctatctgcctcagcctcccaaagtgctgggattacaggcatgagccactgagcccagcccacattttttgttttatggattgtgcttttgatctcatttctaagaattctttgcttaatccaaggtcacgaatattatattttcttggacaaagttttaccttatacgtgtaagtctgatttatttcagtctaatttttgtatatagtatggattgaatttatttactttctccctgcaggcattcagttatcgaagtatcatttgttgaagagactatccatttccatttgaattacctttgcacattttttaaaaaaattcaattgtcagttctgtttggatctgtttctggactttattctcttattcatctgtgtgtctagttttttttgatgccatatacctttattgtagccttttttttttttttttggagacggagtctcactcagtctccctggctggagttcagtggtgcagtctcggctcactataaccactacctcccggattcaagcgattgtccttcatcagcctcctgagtagctgggactgcaggtgcgcacactaccagtccctgctaattttttgtatttttaatggagacgaggctttgccatgttggccagactggtctcgaactcctctcgacctcaggtgatctgcctgccttggcctctgaaagtgctgggattacaggcatgagccactgtgcgtggcacctttacgatagctttatatgcagtcttcaaaccaggtaatgtgaactgtgcaactctttgttctttttcaaaattatttagcaattctatttccttttccctcccccatgtaaattttagaaggtacacaaaatttgtatataaattccacatttctccatttattcatctaccaatagttgagtagatgaagaaaaatcttgatggtattttattatgtatatattctacattttcttcacctattcatctgttaatagacaggttgattccatatcttgggtattgtgaatagtgctgcaataaaatgggggtgcaggtatccctttgatgtgctgatatcttttccttggataaatacccagtagtgagattgatgaaccatatggtagttatatttttagtgttttcagaagtccccatactgtttttcctaatgactgtactaatttatattcccgtcaacagtatatgagagttcccttttctctacatcctcaccagcatctgttattttttgtctttttaatagtagcctttctcactcgagtaagatctcgttgtggttaagatatatacatttccctgatgattcatgttgttgagcattttattttctttttcacttttgagacaggatctcactctgttgcccaggctggagtacagtggtgcgatcacaggtcacttcagcctcatcaactcaggctcaagtgattctcccacctcagtctcctgattagctgggactacagttgtccaccaccacatccggctaattttttgtattttttgtagagacggggtttcaccatgttgcccaggctggcctcaaactcctgggcgcaggtgatctccctaacttggcctctggaagtgcttggattacaggcatgggccgctgctcctggactcatttttttcatatacggtgttggctgtttgtatgttgtcttttgagaaatgtctgtttatgtcctttgctcacgtgtgtgtgtgtgtgtgtgtgtgtgtgtgtgtgtgtgtgtgtttatgtacttttttgcccaccttttttttttttttttttttttggagacgaagtctcgctctgtcaccaggctagagggcagtggcgtgatctcggctcactgcaacctctgcctcccgtgttcaagcagttctcttgcttcagcctcccgagtagctgggattacaggtgcatgccaccacgcccagctaatttttgtatttttagtagagatggggtttcaccgtgttggccagaatggtcttgatttcttgacctcatgatccacccacctcggcctcctaaagttctgggattacaggcatgagccaccatgccyggccttttgcccactttttaatgggatttttttttaaactgttgagtttctcatatattctgaattattagtcacttgtgcgatgagtagcttgcaaatactttcttccattcaacaggttgtctcttcattctgttgattgtttcctttgccgtgcagaactgtgcagtttaatatagtcgcatttatcattatttatatcgcctctggagtttcaggtcttagccataaaatctttgcataaatctgtgtcctaaagtgttctccctttgttttcttctagtagttttatagtttgggtcttatgttttaagtttttaatccatcctgagttgaattttgtatacggtgagagataggggtccagtttcatttcatgtggatatccagtttttcacataccaattatcaaaatggttgttttttccataatgtgttgtgtgttcttggaaccttagtgaaaaatctgttggctgtgagacggtgtttgcaaaattgtaactgaggaaattgcgacagtgaaagaaatcagtggttttaaatacatgttacactgttagcaacttttacttttggtttaaagcctggttagtacatgattttaatttaaccaataccatcctattttggccactgtaggcttgtaatatattttaaagtcgggtagtgtagtgtgattccttcagttttgttctttttgctcaggattgctttggctccttaggctcttttttacttccataggaattttaggattgttttctctatttctgtgaaaaatgatgttggtattttgataaggattgcattgaatctttgtatcgcttcagacaatatgatcattttaatgatgttaattcttcttttgagcatgggatgtctttctatttgtgtcttcagtttcattcatctgttttgtagttttcattgtaggcatcttttcccttttggggtacatttattcatggatgttttttctttaggtattataaatggaattgtcttttttgttgttgttgttgttgttgttgttgttgttgttkagacggagtctcactctgtcgcccagactggagtgcagtggcgcaatcttggctcactgcaagctctgcctcccgagttcacaccattctcctgcctcagcctcccaagtggctgggactacaggcacccgccaccatgcccagctaattttttgtatttttagtagagacggggtttcaccgtgttagccaggatggtttccatctcctgacctcatgatccacccgcctcggcctcccaaagtgctgggattacaggcatcagccaccacgcctggccaccttcttgatatgtttctcagctattgcmttattggtatatagaaatgctactgatttttgcttgttgatttttttatcttgcaactttactgaattgatcagttctatgaggtttttggtgggatctttaggttttcctagatacacagtcacattattctcaaagagggacacattgacttcttctttcccaatttggatgcctttatttccttattttgcctgattgctctggctaggacttgcagtattatgttggataggagtgaagagagtggcggcttttttgttttgttccagttcttaaagggaaggttgtcagttttccccattcaatattatgctagctgttgtttgtcacaagtggcctttattatgttgaggtatttttcatctgtgcttagaatgttgagagtttttattatgaagggatgttgaattttatcaaatacttcttctgtgcctattaagatgattcatgactgtcgatttacatatgttgaaccatccttgcatccctgggaaaattttcacttgatcttgatgtttttgatgtgctgttgaatttggttttctattttgataagaatttttgtatgtatgttcatcagagatattggcctgtagttttattttgttgttgttgttgttgtagcattcttgtctggttttggtattagggtaatataatgctggcctcttagaataaattaggaagaattccctcctcttcagttttttggactagtttgaggagaagtggtgttagttgtttcaaagtttgatagagttctgcagtggggccatctgatcctgaactcttcttttttgggagattttttactactaattttacctcattacttgttattagtttgtttagattttctatttcttcctgattcaatcttggtagttgtatgtgtccaggaatttatccatttcttcaaggttttccagtttgtttttgtatagttgttcataatggtctctgatgatcttttgtatttctgtggtatcagttgtaatttctcttttttcgtttctgattttgtttatttgggtatccttttttgttgtttattctcaacaagcagttaattgattttgtttatctcttcaaaaaacagtttttcatttcattgatcctttgtattttgttagtatctgttgcatttgtttcttcttgatcttaattgtttctttccttctgttaattttgggcttgccgtgttctattctgttttcatgggatgtatggtttgacactgtatttgaaattctgttactttttggttataggtattaattatgaacttccatcttagcactactttattaaatattctctagattttggtatgttttgaattgatttttatttattgtaaagctacatttgatttcatccttagtttctttcttgacctagtggtcatttaggagcatgttgttcactttccatgtattcgtacacttcccaaagttcctctttgttgatttctagttttatttcattgtggtctgagggtttgatacaattctaatttttaaaaatttgttgagactctatttgtgtccaaaaatatggtctatctgggagaatcttccatttgctggtgagaagaatatgtgttctttagctgtgggatgaaatgttctataaatgtttgttaggtccatttggtctaatgtgcagtttaaatctaatgtttctttgctaattttctgtctgttagcatgcagtgagtttttgggaaaaaaaaaaaaggaaaaaaaaaagaaaaacaaaattctgtctagatgactagatgatctccctaatgctaagagtgggttgttggaaaccccaattattattgtactctttctctccatttagatcttttttctttttctttttttttttttttttgagacagggtctcactttgtcacccaggctggactgtattggcacgatctcagctcactgtaacctctgccttccaggttcaagcggttctcctgcctcagcctcctgagtagctgggattacaggcatgtcaccaatttttgtatttttagtagagatagggtttcaccatgttggccaggcttgtcttgaactcctgacctcaggtgatctgcccaccttggcctcccaaagtgctgggattacaggtgtaagccagcacacctggtctccattgaggtctaataatatttgctttatacatctgggtcctctgctgtttggtgcatatatgtttagaattgttatattttcttgatgaatcaatctcttttatcgttatataattaccttgtctccttttactgcttttgactgtttaattgtagctacttctccccacttttggtttctatttgcatggaatgtcttttgtattcctttactttcagtttatatgtacctttataggggagatgagtttcttttgggcagcatatagttgtgccattattttaaatcatttcaactagtctgacactttaatctgttttattattaacatgtgagggcttattcctgttattctattacttaatttctggttgttttgtgtattcattgttcctttctctcttcttgttaacattgtggtttggtggttttctgtagtgctatcgtttgaggcttttctcttccttgattgtatttgctctaccactggggtttatattctgtgtgttttcatgatgatagataccattctttattttcccagcatcagactcctttaagcatttcttgtagatttggtctagtgatgatgaattttcttgcttttacttgtttaggaaagactttatttccccatcatttatgaaggataacattgtttggtatagtatattcggcttttttttttttctccttcagctttttgaacctattatcccattgtcttctgccctgtaaggattgtgcagagaaactgccgttagtctgattggggttcattaataagtgactagatagttatgtcttgctttttaaagaattctctgtctttgacttagtgacatttttactataaggtgctctggaaaagatatttttgagttatatacctttggggatctttgtgctttatctgagtatctaaactttttgccagccttgcgaagttttcatctattattttgttaaacagactttctagcccttcaagttttcttgttgcctcctcaaacacaaaaaatttgaaaatttggtagctttatgatgtcctatatgtgatgaggatttgctcgttctttaaggaaatttaaattttcttttttcggccaggcgcagtggctcacgcctgtaatcccagcactttgggaggctgagacaggcagatcacaaggtcaggagatcaagaccatcctggctaacacggtgaaaccccgtctctactaaaaatacaaaaaattagccgggcatggtggtgggcacctgtagtcccagctactccggaggctgaggcaggagaatggcaggaacccaggaggtggagctggcagtgagctgagatcacgccactgcactgtagcctgggcgacagagcgagactccgtctcaaaaaaaaaaaaaaaaaaaaaaaatttttttttttcttttttcttctgactgggttatttcaaaaggtctgtcaagttctgagattttttcttctatttgatctagtctgttgaaggtttgaatgtattttgtttgattcgatgaatacatcaggtcccgaatttgtttcatccttttttatgctgtctctttggtgaatttttcattcatatcctgaattgtttttcttttctttgtattattttctttgtgtctcagtgtaacagaatactttagtatcaatattttcaattccaagattttataaatttctttttgattggaatctgttgttggagaattactgtgttcctttgaatttattatcatggattcacattttcttgcttcttcttgtttcttttatttctacattgatatctatgcatcaggtattgacagtcacttcttccagtagtttgaatttcctttcataggggaggaatttttcctagagatgtatctgtggtgttggttgggtagggcacttttgctttgattctggatatatgcagtggtgtagactccatgtgatttttttaggcattaaacagggtcagtgttgtctgtgatttcttctgtggtttagtgggtggttcttaatggaagctgtggtgacattttattagggaatgggttgccacatgggccactttgggctcctttggtggtagtcagaagatcatgtctgttttggggcttcagtgtggcgtatgctgccaccagagttagtgggtctgtgcaggtcgattcttgggcttccaggcagcttgcttgggtgccaggaatggcagtagtggggtgaatgagtgggcaggttactgggccctgggcggtaggcgtggcatagttgatgtcagtagcagtggcaagacaaccccctggaacccaagcatttcactttggtgttggcagaggttgtgacaggctgactaaatcagtctccaggcctgctgcaggtgcccacatgtgggtgggtgtcagctttggtgatagtggtcagttgaatggaccctggcccctggaaaaagtgctcaggtaccaatggtggtagactaagcaaggtaatctccagaccctgagcaatgtgcttacatactggagggggctgagcttggatgagcagacccgtcctcaggttccctgattgtttgtgcaggcactggctgtggtcaacaggggtggcatgatccccagactaccagtggaatggtcaggtgagggctccagccatcatgttgcagccctgctactggggaaggtgsgttgctttctgttggagcagctgtaggcaggcaactggtaactgggcaggtgcactttgctagggtgttgaccctggcagcagtagcccacagtacagattctggggtctgtgaagtttgtatttagggcatatgaaaatgcctagttaccccactgctagggagggtggggtccggctagtaccttgtgttttccttcagggctgttgatttgggagataacttactctttttggggtgtgtgtgtgtgtgtgtctgtgtatgtgtgtatgtttcacattttttagggttagcctgcatccaaagagagtttattctttacaatagtgaatcttttcatttgtgaacacagtgtatctatttaagacttaagtttccatgtttggtgtattgtagttttcaccgtatatgctctgaacatttttgttatatttcttcttcatttttttctactttttattgtcttaaaatactgttcaaatcaggatctggagtatcctgggttatacaaacctatatataagtaaatatacattttttatcrtagtttgctttattgcacttagcagatgctgaatgtttttaaataaatttgaggttttatgataggtgaaatgacatgcacctgtaatcccagttactcgggaggttgaggtgagaggattgcttgaggccaggagtttgagaccagcctgaacaatatagcaagaccccatgtctaaaataaatttaaaaaagaaacattagccgggtcatggtaacatgcacctgtagtcccagatgcttgggaggccatggtgggaggattgcttgagcctaggagttggaggctacagggagctatgatcttaccactatactccagcctgggtgatagagcaagaccctatctcttaaaaaaaagcaaaaaaaaaaaaaaaaaaaaaaaaaaaggcgggggcagggaaggcatgggatttgtgacaactttgcatctattaagtctgtcggtttcatttttccatctgcacgtggaaaaatattttcatgggtctgttacatttcaattatcacgatatttcaaacttttattattattactattacatctcttatggtgatgtgtcatcagtgatctttgatgttagcattgtaattgttttgggcaccagaagccacacccgtataagaaggcaaacttaatccagaacactatgtgtgttctgactgctccactaaccagccattcccctgtctctttccctcttcttgaacctccggacctccctattccttgagacacaataatattgaaattaatccaattaataatcctatagttgcctgtatgttttcaagtgaaaggaatagtcacacatctctaacttgaaatcagaaagctagcttagcgaggaaggcatgtcaaagccaagacagagcacaaagctaggcctgtagcaccacacagttagacaagttgttattgccaaggaacagcttttgaaggaaattaaaagtgctactccagtaaacacagggatgataagaaagtgaaacgttgttattgctgatatggagaagccttatggacaggccaactctcttgttagggactacagtaactggtgactttttgttgaagtcattgctcattgaccattccataaatcctagggcccctaagaattattttaaatctactttgcaggtgctctgtaaatggaacaacaaagcctggatgacaacacatctgtttatagtaggtttttctaaatattttaagcccactgttgagatgtactactcagagaaaaagattcctttcaaagtattacttctcattgacagtgcatctggtcacccaagagctctcaaggagattaatattttcatgcctgctagtacaattttcattctgcagcccatagatcaaggaataattttgattttcaagtcttattatttaagaaatacattttgtaaagctatagctgccagagatagtgattcctctgatggatctgagcaaagtaaactgaaaaccttttgtaaaggattcagtattctagatgccattaagaacattcatgattcatgggaggaggtcataatatcaacattgaggtgtttaagactttcaagggggaagtcattgcagatgtggtagatatatcaagagatttgtaatcaaaactagagcttgaagatgtgagagaactgctgtaatctcatggttgaacttgaatggatgaggcattgtttcttatggatgggcaaagaacatggttttttgaaatagaactgaatactacttaaccgttggtgataatgcaaccttagcttgtgagaggattgactccagtttcaaaagaggttcagctgtgggtaaagtggccaacaatattgcatgccctagggaaatctttgatgaaaggaagaattaatagatgtgacaaacttttgttgtcttattttaagaaattgtcacaaacaccccaccttgagctaccaccaccctgagcagtcagcagccaaaaacgttgaggcaaggcactttatcggcaaaaagatrctacaactctctgaaagctcagatgattgttaccgttttttggcagtaagaacatttttaagttaaagtgtgtacattgtttttgatttttattttttgagactgggtcttgctctgtcacgtaggctgcagtgcagtggtgtgatcatggctcattgcagcctcaacctccctggctgaagcaaccctcccattttagcctcccgagtctctgggaccataggcacatgccaccatgcctggctaatttttttcattttttgtagagacaaggtcttactgtgttgcctaagctggtcttgaactcctgagtttaagtgatcctcccacctgtgtctcccaaagtggtgggattacaggcaaggaggtacccttaacgatgggttttattagaaatagccagctgttttgttggcttcttccttgacttggatttcttccttgacttggtatggatagttaactagaaacagatgttaactccttgaccagtgcatttctctttcctcawtctaatagataagctttaatgaatatctttagtggatattctaatagataagctttttttttttttttaaagaagcttcctagtgggcagcagtataaacaccaccaaatcaaacttaaccttttaccaggttgcttttattttttaaagaccatgattgagtctaagagtcaggagatttttaatgttaattaaaaactttatatrtatgcagcactgtagtgagcactaaaaataaatgaaagaacagttctaccttaagtgagtttacatgcataatttaaagatacttttattacacttaaaaatataggacggtatttgcttatatactaatacagtgtaagctataaaaaaagtaattgcagtagaaattcaaagctaagttggagttgaagttgggggatgtaaacatcatggaagaacttgagctaggccaaaagagcaaccatgattcaaataagtggaaatggaaactcttcaggtgtaagggagcagaagatgggtggcagaattaggataaaaatataagtgatgagaagactgcttccagcgcaaaagaatgaaagtaggggagcgaagggttgaatgattgaatgtcctatgagcatagagtcagcttcagttttccaaattataacatccttgtcttgttcccatcttaaaggaaatgcttttgattttttactgttgtgtatgatgttagcagtgggtttttcatatagacctttttatatttagatattttcatcctgttcctagtttgttgcatgtttttaatcatgaaaagccatggaatttggtcagatgctttttctgcatcattaaagatgatttttttcctttattctgttaatgtatattacattaattgaacgtcatatgttgagccatctttgtaccattgactacctttgtaagtaatgttttattagcataaagtcaagctcaattgtttacatattgtctgtggttgtctctgtctgtgacagagacagaaggaaacaattatgacagaaaccatctggtttgcaaaatatgaagtatttactatttactctcttctgtgtgtgtgtgacggagttttgctcttatcacccaggctggtgtgcagtggcctgatcttggctcactgcaacctccgcctcctggattcaagccattctcctgcctcagcttcctgagtagctgggactacaggcacccgccaccacacccagctaatttttgtatttttggtagagatggtgtttcactctgtggccaggatggtctcgaactcctgacctcaggtgatccacccgccttagcttcccaaagtgctggaattacaggcatgagccatcgcgtatggctactatttactctttaaaaacattttctaacctctccttctagagtcatcagtacagacatcattatttagtgtacatttagaagataatgggctaatctttactgatcaacactctgtaaattgctttacttgatatagttatggtttatctccctgtcataactaaggggtataatctgattaagggaagttaaatgatggttttatgaaaaatgttaagttaaagaatgaatttgttaatgtcctttctaattcaagttcatggcttatattttgaaatattgttatactcattaaccaacctcttttcttctccccccttcacccatcctagtctctgataaccatcattctaccctctacctccatgagatccactttttgtttgttttttgaatagacagagtctcattctgtcacctgggctgcagtgcagtggtgcgatcatagctcactgtagctatcatagctcactgtagcctcaaattcctgggctcaagtgatcctcctgtcttagcttcctgagtagctgggactaaaggcatgtgccaccatgtccagctaagttttttacttttctcttttgtgagagtcagagtctcactatgttgccaaggctgatcttgaagtcctgggctcaagtgatcctcccatctcctcctcccaaagtgctggcattacaggcatgagccaccatgctgggtcaagatccatgtttttgactcccacatatgagtgtgaacatgtgatatctgtcttttgtacctggcttacttcatataacataatcacctccagttctattcatactgctgcaaaagacaagatttcattcttttttatggcctaattgtattctattgtgtatatataccacattttctttacccattcatatgttgacagatacttaggttgattccattatcgtggctcttaggaatagtgttgcaataaacactgatgtgcagctgtctcttcaatataccttcctttcttttggacatttacccagcagtgggattaccagatcctatgatagatctacttatagtgttttgaggaacctccatactgttttccatactggaggtactaatttacattcccaccaacagtgtactagagttcccctttctgcttcctacaattagatagaaggagtaagtgctagtgttcgatagcacagtatggtaaccatagttagcaataatttattgtatttttcaaaatagctagaagaggattkgaaatgtttctaacacaaatgataaatatttgaggtgatggatattctaattaccstgatttgatcattacacattgtgtgcatgtatcacgatatcatatgtaccccataaatatgtacaattattatgcattagtaaaaaaagatataccactcttctattttgctaattgaattttgtgtttttgttttcataggtgtatgtggaatttgatgatcttgaatgggataaacgagagtgggttaaagtttatgaagatttttcaactttcttggtggaataccacttaatctgggccaaaaggaatgaccctagccagactcagggatcaaagagcaaacagattcagtggcctgcattggtaagatctattcctgtttcattaagcattttcatttgttcgtttaaaacaaagaacaacaacaacaaaacaaaggccaggtttggtgactgacacctgtaaaactagcactttgagaggctgaagcaggacgattgcttgaagccaggagttggagatcagcctgggcaaaaaagcgagaccccatctctaccaaaaaaaaaaaaaaaaaatagctggatgtggtggcacatacctgtggtcccagctacttgggaggctgaggtgggaggatcacgtgagcccaagaatccaagtcaatgtgagttactgtcacactgctgcactccagcttgagtaacagagtgagaccccatctcttaacaaaaaaaaaaagaataaatgaaaatttaagactaagaattaaatagaagtttagattcatcttactgatttataaattaatatttttgaagagtctctgatgaatctggcagagattttaaaacactgccttcattttgttaaaacaactttaggtgtctctttgttagtattctgtcagcgtatgtagttaatgaataagtttattctatcaaattaaaatataaattggattaaagggacctgagagatagttgactgtatgccacgtggaacaactttgctgaatgaaactttgttaagtgggagatggaacatactttgtattaaaacatttaataacgagtaattcttcttggtttgttaatcagtaaatcattgtgggtgatagatgtttaatgtgtaattattcaggtaatggattaaattacttatcaggacatgtttcatttaagaaaatataataattttcagtaaattctctggtactttgaagagttttatttaagaaaagaaacaggaagtaaacaaggtcattaaattgtattaggaaaagagccacattcatttaactattgttattgctgttttctggcaraacatctagcatataacaaatttgcaatatttgtaaagttttcttcttatgttactatcaaagaaatatwttaaaagctgctgaaacattattgcaggtatttgatataactaatgagttagggtagttcctttcaattttttaagcctgcaaattaactaattacaaggatagcttctgcttgctaataattttaatgcatataacttttctattttagttaatcctgatgcttttctgtatagaatagaaatttaatagatctgtttatttgattattcttttttaagaagtcagtggagatatgaataaaaagacaggataggaagggagggaagagagtgaatggaatcagtggcatttttaaaaacaaaatataatattgaaagatgaaaataatatctgtctgtgacctgcagtttcaatagaaaattttgcatagcaaactaaagaagataattttatccatagtaggttttaaaaaatatttaatgagtatgttgaattgttcatataaaaagtttaaaccattttaaacttttayagaccttaacccaaaagcatgattttaattttatagaccttaacccaaaaactggatacaatttatgagaaattatgaataattagatgtataggtgaattttatatgagaattctcaaaagcacgaagcagtagcatcaataatatgaaaaactatacatcagtatcagagttaaaaaattaataaagctttagaaaaatctttgcctttttgtttttttgagatggagtctcactctgttgcccaggctggagtgcagtggcatgatctcggctcactgcaagctctgcctcccgggttcaygcagttctcctgcctcagcctccggagtagctgggactacaggcgcctgccaccacgcccggttaatttttttgtattttcagtagagactgggtttcaccgtgttagccaggatggtctcgatctcctgacctcgtgatccacccgcctcggccctccaaagtgctgggattacaggtctgagccaccgtgcccagccaatttttgccctttcttaaaggcaattaagattgagatgaatttctgttgtattcataaaatactgattttagagagaatttttattggaaaatactgtttaatgataattttgtcataattttacaaagttgtttctgttgaaaacctcttagccttgaaattaggcctacttaaacaatcaccaaccttttctttttaactttatcatatacaaaagaaaaagtgatgaaaaatttggaaaacactgtggtatgaaagtaatagaggattatctttttagtcctattactaagagataactcatatatattatatatatactaatatatataatttttgatatattttcttatgaaacatattgctctggttcctttttttttttgccatactatttattttatttatttagacaagatctcacttttccacacaggctggagtgcagtggtgtgatcacagctcactgcagccttgaactcctgggctcaaaaaagatcctcccaccttggcctccccagtagctaggactacagatgtgtgccactatgcctagctaaatttttttttttgagacggagtcttgctctgtcgcccaggctggagtgcagtggtgcaatctcgtctcactgcaacctctgcctcccgggttcaagcaattctcctgcctcagcctctcgagtagctgggactacaggtgcctgccatcatgcccggctaattttcatatttttagtagagacagggtttttcaacatattggccaggcaggtcttgaactcatgaccttgtgatctgcctgcctcagcctcccaaagtgctgggattacaggcatgagtcaccatgcccggccctctgctaaattttttaataaaaatttttaattgtggtaaaatgtacttaacataaaatttgccattttaactgtttttgagtacacgggtcattggtagtaagtacattcgtgttgtgtgttaccactattgtcatccaaacacagaacattttctgtcttgcaaaactgaaactgtactcattaaagagcagttccttattcccccgtcttcctggcccaccattctactttcggtctctgagtatctcatatgaatgtaattatacagtatttgtccttttgtaacgggctcatttcactgacaatgtcttcagggttcatgcatgttaaaccatgtgtcacaattttcttcctttttattgcaaaataacattccattgtgtttatacaccacgttcttttcatccatttgcccattaatggacagttgtgtcacttccagcttttggctatagggaataatactggtatgaacatggctgtataaatatctgcccaagcctctgtgttcaactatttgggtatatacccaggagtagaattgctggatcagatggtaattgcatttttaattttttgagacactttcatactgttttccaagtggctgcaccatttttcatttccaccagcattgtgtaagggttccagtttctttacatcctcaccaacatttactttcatttttttggtatttactttctcagtaggtgtgaaatggcatgtcattgtggttttgttttatatttttctaatgcttaatgtgatgttgagcatcttttcatgtgcttcttggccatttgtatgtcttttgagaaatatctattcataaagttctttgcctgtttttgaattggatcatttgttttttttggtgttaagttttaggatttctctatgtattcttgatattaatccccttttagatacatgatttggtaacattttctttcattttacaggttgcctttttactgtgttagcagtggcccgtgctgcacaaaagttttaaattttgatgaagcccaacttgtctgtttccgcttgttgcttatgcctttgttgttgtattaaaaaaaaattgccaaatccatgtcatgaagcttttccccttatgttttcttctaaaagttgtatagttttagatcacaaattttggtgaattaattgattttaagtttggaatatcatgtaagggtccagcttttttttacgtgtagatgtccactttttccagcaccatttgttggaaagactgcctttgccccagtgaatggtcttgacactgttacagaaaatattttgactgtatatgcaagggtttgtttctgggctttctattccattccattggtctgtatgttcttatgctgataccagctcactgttttgattactgttgctttgtagtacattgtgaaatcaggaaatgtttttccgtcaactttcttctttctcaggatagttttggttattcagggtcccttgagattctgtatgaatttcaggagagatttttctttttctccagaaaaagktcacttggattttgatagggattgaattgaatctgtagatggatctgggtggtagacatcttaatattaagggctgggtgctgtatcccagctctttgggaggctaaggcgagaggattgcttgaggccaggagctcaacaccaggctgaacaatgcagcgagcccccttctctgcaaaaaaaataaaataaaataagccgagtgtggtggctcacgcctatagtctcagctacttgagaggctaagtctgaaggattgcataagcccaggagttcatggctgcagtgagccatgattgtgtcattgcactcaagcctgggtgacagagtgagaccctgtctctaaaactacacacacacacacacacacacacacacgtgtaaatattaagtcttctagtctttgaacaggggtgtctttttacttatgttttctttaattttgctcagttatgttttgtagttttgtttatttcatcttctaggtaatttattcttttttgatgctcttgcaaatggaattatttgttaatttcattttcaaattattcattattgttatatagaaactagtcagcgtgagcctgtagtcctagctacttgggaagctgaggtgggaggatcccttgagcccagaaattcaaggctgcagtgagctatgattgcaccagggcactccagcctgggtgacaaaccaagaccttgcctcaaaaaaaaaaaaaaaaaaaaaaaagccaatttttatgtgttgatttcatatcctgttgcttaggtaatatcctagtcaatggtgaaagactgaaagcttttcctctaagatcaagaataagacaagggatccctgcttttgccatgtccactcmacatagtatttgaagttatagtccagaaattagacyagaaaaagacaaatagcatttaaattggaaagaaagaagtaaaattgtgtctgttcacagatgatataatcttatacttagaaaaccataaagacttcacaacaaagcctactggaactaataaatgaatttggcaaattagcaagtacaaaatctctgccttcttttaaacatagttttagctaacactgcattaaaattgtagatcctgcttttttgcctaacatctatcctctacatttctcttcatgagtagtaatttaggatcatttttaatggctgcataatatttaatcttataatgacccatttccttaatgtttgacattgtagtttccagttctagggagcattataagcaactgggataaataccattgcaagcctttgtctgcatctctgattttttaaaatgtatattcatagtagtagaattaataatcacagggtatgaacttgaaagccacaaaaatctatctcctgacactcttcacamattgtgtaaaggttgtactgactgccattgtcctcagtcagtgttggggtgtttttatctcactcatcacacccttgtaagcattaattatttatttgcagtttatcttgttttaaaacacaaatatttggccaaaacaggaggagttttacatcctaaggggatgcagcattgaatgttactctttctctgctaattggatatttgaaaataatatttcgttgtttcaatttgcattcctttaatagggtgaatttttttcatgtttatgagcaacttgtatttttagtgaattgttatttagtacttattagggttttgagttttttatatttgttatgagctttctttatattattacagatattataacctttttgtcatatttcatagtttgcttagccagttgtttgatagtaagtctttttgaattgtatgtttattttaaagtctatgcaaygggatattgtcattaattccagtagtcaggttatgtgtgcttgccttccttccttttttcttttgttttaggagattgtaaaaattaataaacaagtgaagtgagaatgcttgtttgtaataattaagaaaatagtcaatttaagtttcataagcattttgcaaacatttatatacagttgatatgactgagattttattgtttccttttttgttcattaaaatttggcttctttaaggatgtctataaacagcaattataaagttaagcgttttaaaattcctacagcgtaatgaaatactatatctacagatttgagaaatttgagggatctgtatatgagatggcaatagaatgaaacagtagaaactaatactttgtctttaattttctacaaatttaatgtttctatttctgtgcacatgatacttgctttatgttcttttgtatttaaacatgtttgtatttattatcttctttctagttgtttcactcctcgtgtggtacttgtttaatattacatatcagttacgttatcttgtctacctcttatacctagaaattagtggaaactggcagtgtacctgctgtttcttgagatcatgacaagacaaaaacaaatcctgttgtctcattaacatattttaaagtatattttttaaaacktaacataattgcatcttcagcaaaatatgaatagtataatacccaggctccttctctggaattgtctggttcctctttctttctaggatatcagtagcaaaacatttatgggagcaccacatgtaagatgctgaagtggtgtctttttttgcttggtcctgtacaatcagagtaccacttgaggccattctaatgctgtaggctgaggtaacttgcgtcttcatgtaagttacttaatagattgttaaattttatttactttttaataaagtaaaatacttgtgaaagcacatttatcggcaccagggaaagaaagtgttggcattcataattgaaatcaacgaatcacctacctaactgggttagggccctggctccatctcctttaggaaaaccttctgtggggagtggggcttcgaccctaacccaggtgggctgtaacactgctgtgttttctaaggggcagagttttctactacttttccgctggcccagccttccagatcaccccaaccagtgctcctatataaccatcctgtgctcctatagaactttgttttgtacctctgttttaacaatcagcacattctgctttgtattatacctatttgtttgcatgtctgtcttcccttaatagattgtaagttctttgaggacaggagtcatgtcttagtcatctatgtatggttccttggagtctagcacagtgctttacccatctcagaaagtaaattcttattttaaagtgatgaatgtgctgcaacccagctagtgaaaaagaaccctactgggagttatcacaagttttctgactattaacatatgataatatcaaaggacaggaaagcagaatcacccaattgtggtaaaactgtgagttaccaattttaaacatgtcaatatataataaaaaatactaaaaagcttataatgccaattctcatcaggtacaaatttgattcctgaaatcaccaaggggaaaaatgtaaaattacctgaaatgcgttattttaaagatgttaaaggaagaaacagaagtcctcacaattgacttaaatattcaaatctttgataatttacttgaatttctgaattgagttttaggaaactcagactactttttctcaatgtagcttttccttcatagataggcaattctggttcaaccaggaattgtgatgacatcataaacacgtaaactcttagcaatttatttattttaaaatattctcttagagtgctttttacttactatctgttccaaaagaaaccccctcaaaggagaatagagttcactgctctttgggacaagattacctttatatccagcagttatcaaagttggtttagattatggcctcaagcaaattttactaaaatgtgaaaatatgccaccttccaagtcagaaataaactttggagtatgttcatttaaagagtttttacatatttataattgaatttccacaattagaataaacagttgcatgtctttttgtactttgttaaataatgaaatggaagtaatgacaatataacttcaggattgttatttctctacaaggtaaagcactttaagagatcaaattatacataataaaatattaagctttttaaatgataaactctaatactggcatgtattgcaatgaacgagttcacacactcatatcttgtggattataaaatgacattattcttttggaaagtattatgttataagaaccataagaagttcatactctttgattcattaattctagtcttaggaaacgatgcttgaaaaacagtttttaaaaagtgtattcagtttagctaatgtttgtcacgtacctcatacgaattagacactgtggtgggagctgcagattaaaaaaatgaaaggtttaatgttattagaagaaagatgtttattgcagtcttattaaagaggaaaagaaaaatggaacaaccttgatgttcaacaatttgtgaatgctgttaaattaatattttggcatattatgcagctttaaaagtgataattgtacatactttaggaaaatgtagagaaaatttaagtaaaaaaaattaattacatcagcactagaattatgtatttaaaaagtcttatagaccagggacagtggctcatgcctataatcccagcactttgggaggttgaggcgggagaattgcttgagtccaggagttcaagaccagccagggcagcatagctataccctcatccctaccaaaaaaaaaaaaaaattagcctattgtagtggcgcaagccttgtagtcccagctactcaggaggttgaggtgggaggattgcttgactccaggagtacaaggctatggtgagctatgattatgccattgcactccagcctgggcaatggagcaagaccctgtctcaacggaaaatatatatattataaagtaatggagatcattattttatattatggcagaattttgcctgaccaaaattgtcttttccctaaaaaacaactattatttcctagcaaattggaaatttcatataatgatgttattcagtattttatattttggaggtagtcttcttcaaatgagttattttagtaaacttgttttatgtttctgttaatatactttgataggtattatttgtgttttgctattgcagcatttaaaaaactgtccttaatatacaaagaattaacacttaataaaaatgacagcttaaaccataacaaagtaaaatataatgaagattatttaaggcttgttttaagtctgtctgaatttcttgtttacttctagatttgcatggcttgaacgttagaattggggggaaaatagcagttatcaaggaaggtagcataatatgttaaggacatagactttgtggcatatttcttggttcaaatcctgattcttccatttactgttaatgtcatttatactctgtatgtctcactgtgttcataatagtaatatctaccacacagagtagtgaagatcaagcaagacagtatataaataaaacttcagtatagcactgcagtgagtttagataggtgtacactttgagagaaacctctgtaagaacaccctcacttctggcactagtttcaagtttgaggcattcccaaaaccatccacagggttgataaatcactggaagattgatataactcattgagagctgttacattcatgcctacagtttattgcagagaaagtatacgaattaaaatcagccaggggargagatgtttagggtagagtccagactcttctccctgtgcagtcatgtccagcattatctttttatgtccacagtatgtgagtttcgtcagtgaagaaactcatctgagtctttgattttccagttttactggggctcaaaatcacatactagctgaaaggtgtagctttggcctctgggaggtcagactaataactttagttctcacttcttctggaggtcagaattgatactggaatgtcgaaagcccccattgtaaatcacattgttaaactgtccagtggccaaagcctccaggcaaacaaaaacactcctatcaagcaggtactcctaagaagcaagatattctagagccctggagatcatctctcagttgccaaggtggaagcccaggcatctttttcttctttggtgtataggctatgccctagcctttggcctacactcttaaagcaaaatgaatatatttgaacgtctacatttaggttttatatgacagacattgcagtagtaactttttgaatatgcctaatattgggaggagccagtgttgaataggtgtacatttaaataaacagtcaatctaatttataaagccattatgtacatcattttcttgtactaatttaattactcattttcccccggatttaccactatttttgtatcttatgaaaaattcatgcaggactattggcatagaaattagttgatgggctgggcacggtagcaaacgcctgtaatcccagcactttgggaggctgaggtggggggtatcacttgaggttaggagttcgagaccagcctggccaacatggtgaaaccccatctccgctaaaaatacaaaaattagccaggtgtggtggtgcacttccataataccagctgcttgggaggctgaggcgagaattgcttgaacctggaaggcagaggttgcagtgagccgagattgcatcattgcactcctgggcaacagagtgagacgagaagaggagaagaaaagagagagagaaagagaaagaaaacaggaagaaaaggaaggaaggaaagaagaaaagaaagaaagaggaagaaaaattagttgatggttaactaattcttccttaggctattcattttccatcattattacaccctgaggaggctttaactaaatttcctgatacattagatgatcaatatcagtattataagattgatttctataaggggctgggcgtgatgattcatgcctataatcccagcactttgggaggcgagggtgggcagatcacctgaggtcaggagttcgagaccagyctggccaacatggctaaaccctgtctctactgtagtcccagctacttgggaggctgaggcaggaaaatcgcttgaacctgggaggtggaggttgcagtgagctgagatcatgagactacactccggccagggcagctgagcgagactctgtctcaaaacaaaacaaaaaaagatttatttacataaggtaaatgaatcttagcaacagtgtcacttgttatgccatagtgtgttatgtcacaacgtgatgctgttttattacagaacaaatcagtaagaattgcagaggaatttgctatgccgcctcagcagaattgacccttacctggatgctggatattttcatggataggtatagttacagtgggcccttactcagttatttctgagttccaagtcatttaagaacaaagctacttaccttgtctcagttcacaggcttgtactaagactggtttccctatgtgctgttatatagtaaggtctccatgttcgtgaatatgatgtatttctttggtagcattttcctgcacagagcattccaatttaattatggaactcttctgggtactgctttcccctgagaatgtttctccaacatttcccaggacagtatatatatttcaggttttcagattcagagaagcagtgtcagttaatgcccaatagtaaactagttgtccctcaaattgaaatttttgggtccagaatcctgatggttttcctataagctccagtcttgtgctccacacaggactgttgtataaagaatttgcccagcttctattctgtactatttgaaattaatttggatgggctcaggcattttcactggctttcaattagcatgtcctataaatattgcctgataggaagatttatatgtattctgtttaagtaggggaaacattcgccagtcagacgtaataaatatctccataatgcattcaggtgaaggagacacactactgtacataaagtacattcagacattcttattttaatccagagttttaccttgatccataaactcttgtgttgttatgtctttccagtataactgtagctcctgttaggacttcaccaacagatttgtaagttctgtgcatgggtctctcgtggaaacatctctatgcttaactattttatccatttaaaagcatttgactctgggtccccagctagggactagcaaggaatctaggtcttctcttcaggccttatctaagcattggcttaggcaagttgaagttagatttttcttagtcatttttgccttccagtttttaaagtttcctcaaactagggtgaattgccgggtacagtagctcactcctgtaatcccagcactttgggaggcygaggctggcagatcacctgaggttgagagtttgagaccagcccgaccaacatggagaaaccccatctctcctaaaagtacaaaattagccaggcatggtggcgcatgcctgtaatcctagctactcgggaggctgaggcaggagaattgctcgaacctggaaggtggaggttgcggtgaactgatatgccattgcaccccagcctgggcaataagaatgaaactctatctcaaaacaaacaacaacaaaacaaaaacaaaaacaaaaaaaaactagggtgaataaagcagatttgtttagggctctttaatggaaggagaccagcaggggctcattggtccactcaacctctgagagtgctgcagtgtgacctttgttttggcttcaatattttatcccatttctcaataactgtttaaagatttrcacccagctgggactagtctcttgaatctcctctttctttttctccattgtcttatgaatctttattgcctgttattttggtaagacttttacatatggcagtgggtctgtgactactggctataactggatctggccaaaaaccaggcttggcccagcattaggatttgcgtttctgtttcgctattccaggtaacaataatcaagggattatatagtaactttatttattgtttatgtaacattttcttatgtatccagtgacccaggcacccaggagttggatccatcatttctcagtcccactggtaacttttatttctactaattgattgtaatacagctgtagttggagctattatttgtaaattccactggtaatgtttacctccattaaatgattatagcacagctatagttttataccatgagtggccttgtaaccatccaggaaacaaaggtttgtcatccctcattctttctcttcattcagtgagtcagcttcagcaagttaatgtcattcttgtgcccacttccgataccattgctgcaagcttgagggattccaaaaccaacctcaggtttgataatttgctagaagaactcacagaactcattatattcatggctatagtttgttacgtagaaatgatacacattaaaatcagccaagggaagagagacatagggtgcagaatccaggaggagtccaaatgtagagtttctgattgccctctctctgtggtatcatagacaacattagctcatttcaatcacagtgtatgacagtactcacagaatattgtcaaacagggaatctcagcaaagcctttggtgatcattgtttgtattgggatttgatcacataccacccacatggctgacctttagtctcctgctgcttccagaatgtcaaactattacctttagttattcctttctctggaggtcacagctattactttgtggcccaaagccatactgtgtgctgttatatagtagggtctatgtgctcattataatgatatgttcctttggtagcattttcctgcacagaccattcccatttcattatggaattcttctgggtacttcccattgtaaatcacatttttagatagtccagtggccaaagcccccagacgaacaaaaacactcgtatcagccaagacatgccagaggcctagtgattgtttcccagtagctgagggcagaagccagacctctttcaataaggttgatctttcactgtattaacactgtatataaaggacttttataaaagcttgtagttatggtgttattgtcatcatccagtttaatgccctcttttttccagtaagaaaagaaaggtctgggataatcatgttaattgatttgtttacattttcattttaattagtagcacaactgagagtgaaaatggaacccaaatagtccatctttagcataatacttttttttctcctctagtggagcttataccttgccaattattgaatcttgaactcctgacctcgtgatccacctgcctcagcctcccaaaatgctgagattacaggcttgagccactgcacctggcctgaattactgactcttactgagaataatcatggaaaaacatttgtattttttgatcaacctagtttcaggaaaagtcttaaaaggaaaacaacctaatttttattttagtttacttctgatcagacaatttaagatttggagatataaatgagaataaactaaaatttttgtgttcaggaggtatagagagtaaggagacagatgtacaagtggaaaatgaaacattcagttatagaataaaagtttataaaaatgggacaaatgaagaggaagtgcctggcttggctaaggaaaagcgatacagaggaggatgaggcttgctatgattttaaatgctgaattggcattttctgatccaaaaaggttggaaggcgttgtatgagaaaacaggtcctgattgggaaatcccaaggtcttgtgccaagctggcataggtagaataattgtgatggagtggagtaagcggtgatcaaatcataaagggtcttgtgttacaatagaattttggaaatattcctcctgtagggaatggaaagccatggaaccaaaattatctggattaaatcatcaattttgtattttaagtaggttgctatagctgtagtatggtgggatttgagagcagctagcacattatcctgtaattcatccctttgtttgatctaggtgagacttggataaatttgtctggtaaaacatgtgctcggccacgtgtgaggtggcctgtactcccagcacttagggaagctgaggcaggcaaatcacttgagtccaagagttcgagaccagcctgagcaatatggtgaaaccccatctctacaaaaaatacaaaaaattagccaggtgtagtggtgccttcctgtagtcccagctccttagaaggctgaggtgggaggatttcttgagcccaagagtttgaggctgcagtgagctgtgatccagcctggacaacagagtgagagcctgtctcaaaaaacaaacaaaaaacctgcttatctttgcttcctccaaaatcgcaccaagatagcaacaacaaaaaaaggatgaacagtaagagataatggtcacaagatagaaatacatttttagaatgtagggagtgggtgtcaattagtgaccaatttaacaggattaaagaaaactgggccasgcttcacgcctataatcycagcactaggtttttgttttgaccccttgcccactccaatcccagcactttgggaggccaaggtgggagaaccgcttgagcccagaagttgaagaccagcctgggcaacatagtaagtcctcatctgtacataaaagttaaaaattaaccagacagtctgggcgcagtggctcacacctgtaatcccggcactttgggaggccaaggtgggcggatcacctaaggtcaggagttgaggaccagcctggctaatatggtgaaacccagtctctacgtaaaaaaaaatatatacaaaaattagccaagaatggtggcgcattactgtaatcccagctactcaggaggctgaggcaagagaattgcttgtacccgggaggtggaggctgtagtgagctgagatcatgccactgcactacagcttgggcaacagagtgagactctgtctcaaaaaaaaaaaaaaaaaaaattagccaggcatggtggcgtgtacctatagtcccagctacccgggagaggctggggccagagggggaggatcacttgagtctgggaagtagagattacagtgagccatcactgcactccagcatgggtgacagagtgagaccctgtctcataaaaagaaaaacctgaaatctaaatgtcatcagaggggaatgctagcagattttagaaaggttcaaaatcaaagccccagatgctttgcatggtagaagtgatggtgggaactgataatgcaggaattgatcgaaaaattgtatgggttaggcgtggtggctcacgcctgtaatcccagcactttgggaggccaaggtgggcggattccctgaactcatgagttctcagccagcctgggcaacattgtgaaaccccatctytaccaaaaacaaaaaattagccaggcatggcggcatgcatctctaatcccagctactcgggaggctgaggcaagagaattgcttgaacccgggaggcagaggttgcagtgagccaagattgtaccgctgcactccagcctggacgacagagcgagactccatcaggaaaaaaaaaaaaaaaaaaaaaaagaattgtatgaagagaagtagactcccagtgctttcttcatacttctcacagttggcaagctaacctcttcaccacttacagtacattckctcaagaatatgaacagtagaggttctggctttaaggacatttggcccatcagaatttctgataggacaagtgcattaaatgaaaatcctttttctaagtggttctttcagccccatttatttcatgtcaaccagktacgtcccccctgaaatgattagaggattgttacctcagggaaagtgaaggtccctgagaaaagaacaataataaatactggtaataagtgccctacagtaatactcaccaagccactctcactcacaaagtgtttttcaatagctttttagtgcctcatgcttaattatgaatgcttagtcagggatcctcagtcttctaagcactgatcatattttaggaattatatataaatacaatatactaggccaggcatgatggctcatgcctgtaatcccagcattttgagagtccaaggcaggcagattgcttgagcccaggagttcgagactagcccaagtaacatagtgaaaccatacctgtactaaaaaatacaaaaattagccaggtgtggtggtgcccacctgtagtcccagctacttgggaggctgaggcgggaggatcatttcagccttggaggccaaggctgcagtgagctgtcattgtgccactgcaccccagcttgggcaaaagagtgagaccctgtcttaaaaaataaataaatataaataaatatatatatgtgtaactgaactatttaaactattgtgatttacaactaagtttttgcctatctgatggcaagaattgtgcacttaaagttattcagtagaggctgaatacctgatactattagctgttgagtagataatgaataaaagacactttagttatgaattaaaaggaatttcttgattttattggtaaacacttctttcaaactagtgattttttttttttttttttagagatgcagtctcactctgttgcgcgtgctggagtgcagtgtcatgattttggctcactgtagcctccgcctcccaggttcgagtgatcctcctgcctcagcacccctagtagctgggattacagacatgtgccactatgcccggccaatttttgtatttttagtagcaatggggttttgccatgttggccaggctggtctcggaactcctgacctcaggtgatccacccgcctcggcctcccaaagtgctgggattacaggtgtgaaccactgtgcttggcccaaactagtgatttttaaaaagccagtatttctgaagttgcatgaaaaaaggaagtgaaccattattctaaatatcctcttaaattgttttccaaaattaagtacatttaaaagtagatttaaattttttctgctctataattttggactttgctttccatatttcttaagtgtatgaaattgaggagtaggatattctttttctttttttttttttttttttttttttttagttgagacagtattgttctgttgcccaggctggagtccagcggcacagtctcagctcactgcagcctctggagtaggttattcttactgagtccttaacttaagacatgctgtaaataaaattgagaggaagctgatttttaattttaattgctttcaattgaactatttgtcaaaccccagagacacttctgctttttatctgacttttctttctttttagtatttgatgtataccaagttctaggtatacaagtatcaagttgttcatttgtttatgtacttacttatttattgagacggagtcttgctctttttgtccagactggagtgcaatggcgcaatctcagctcactgcaacctccgcctcctgggttcaaatgattcttctgcctcagcctcccaagtagctgggattacgggcatgcgccaccatgtctggctaatttttgtatttttagtagagacagggtttcgccatgttggccaggctggtctcgaactcctgacctcaggtratgtgcccagcttgtcctcccaaagtgccgggattacagatgtgagatactgcacctggcctagttatttatttcttaaaacattaaaataactcacttaagtttaaaattagaaaatttagttattcaaaaataaatttaaaaattgtagttttaagctaccagccaaagttaatatttgaaactgttcatttgtaatgacgaagataatggaaaacaattgaaagtatttaatggaaactatactttttaggccgggctcggtggctcacgcatgtaatcccagctacctgggaggctgaggcaggagaatcgcttgatcccaggaggcagaggttgctgtgagccaagatctcaccactgtgctctagcctaggtgacagagtgagactctgtctcaaaaataaaaaaagaaactatacttttaaaatcaggtttaaatatatttgaaacatgtaacttttgtggtatgtaatatttatctttattaacagtaatttttttataatataagcatgccatcattatccaaaaactgtctacctgcctatctggtaagaattctaattagtgatttctaatcattttggtatgaacaaaaatgtttgtgttggattttcattaaattaaacatacctattgtcaaatatccttttaggaaattactgcatgactgcaagtttagtcttaccaagattgcaagccaagttttaaaattaaggtgctggaaataagacttacaaggttggattaaaacatatccacagagtagattaggtatataatacctgcttaatacatgtttaaacaaagtacattttaagatttcatttcttttattcggagacagggtctcactgtcactcaggctgaaatgcagtggcatgattatagctccttattacctcaaactccttggctcaagtgatgcttctacctcagcctcccaagtagctgtgacttagcgggctactggggaggctgaggtgagaggatcattcttctaagaatgcaccaccaccatgcctggcaaatctttttctttaatttttttaagagatgggggatcttgctatgtttcccaaactggtcttcaactgttggcctctattgattctcctgcctcagcctctcaagtagctgggattacagacacaagccattctgctccctattttaagatttctctgtggtattccttattgttttctgtctgctatctttagaaaagataaggtcttccataccttttttttaaggaacaaaaggtatttttaaatgctacactgactgataggaaaatatgcagatccaatctttttaattctcttgaatctaaaagtaccgggttaccatatggaaacaataccaagccatccttaaaaaagagtttaaattctaaattgtaagagcagttataacaactttcagtactttcttcaataactatattttgattagcatttctgtgacattagtaactctgataaaatgatttcatgaaacaggaggaaacgaccaactcaatagctagaaaagaaacatttcaactagattaaaacaaagttaaaacttgtactgagaccacaaaattcctatcatgggtaatgaaaagtattcattaaaattcaattttttatgtaataagaagttagaaattggatagtcatattcaggtaaattggtcacattatgtggaatgcagaaagaaacaagggaaataaaaccagttctacaaaaatgttttgtcattataaaaatattagatcacattttcaaaaattaacttttgaagaaactgctgtgttttaagaaaatgaaagttagtaggataaattctctgtaaaacgtccagaacaaatgtatgaacataatatgtggttattaccatgataaatgtgcacaacagcttagaaaaatgttaaatagttgtgaatgtagaaatggtggtagccatgaatatggcccaggccagttataccaatggctaggtaatagtgagaaattataatagcaatctctaagatgatactaaaacaaaatgttactttctaagaattaacattactaggattatgaaacaactccaatttaaatgggaatttaggttctcaaatattctagtataacaggtgttcctttcattagtatggctgctcaaagaatatgaaatggatttctatctggtagtaatattcttaaattcacacaattaccatgcttcggtggaaattgaaggaggtcattattttgaaggtccaacatggttagattttctgtcatcttcattttcggagggtccacaagatacaatctgatcgttactaatcaaaactgttttaaatgtgaatgtatgttgtagaacttaaggtagtattttgaactagatagttttaactggccgcctttccagactgcctttaacagcccctgggttatggaggtattgcattctcttctattaacgttgaaacttacctggggaccccaccccactcttctactgccatatgttcaaacttttatacagctttttttctgttttaaaatcttgtttttgttgtgattttattaggatctaaatcctaataaaaaccatattactgagttttcataattttttcttttttccgtttttcccctattctaaccctaatatatgatatatcttaattatatcgtattaaagagacaggatcttgctatattgcccaggctggactagaactcctggcctctgccttgtgagtagctgggaygacaggtacacaccaccgtatctatcttcagattttttttttttaccccatttcttaaattgttatgtcatatttcattgttttatccaaacatgacaattagttgccatttactagaatttaacagaatgtttagatttctcaggatttctatgatgttgtagaacttttctggttttgcctatttcttaagccatagtgagttttatttggttataatctgtgaaaaaattttcgtatcctaaaatagatgatagtttggaatcatttcttgattccttgacctttccattataagtatttcctatatctattcatctcttttgttatacttggaattacttgggattttcactttttcattattgtaattcaaaacagccaagaacagcaagccatttaaatatgaagggtgttgattccatttttctcctgtccagaaatacagttgccacgtctacatgtgttctaatttgagaggtttttttttttttatttagttcttgggggctggcaggggaagtctgttttgggtactaaaagtgcttgcttttttatgtaaggagtttgtctctgtgtgtgtgtgtgtgtgtgtgtgtgtgtgtgtgtctgtctgtctgtgtcttttgacattttaaacacagcatcctatctgtgttgggagataatttcattcattcaataaatatatttgaatacttactgttggctaagcattatgtagatactgtgaatctctgccgtctgacacaaataggtaactgcaattgtgaagagttttatgaaaaataaatacaaatatcttttgatactcttttaaagcacatttatgccgggcttggtggctcatacctgtaatcccagcacgttgggaggcagaggcgggtagatcacctgaggtcgggagttcgagactagcctggccagcatggtgaaaccccgtctctactaaaaatacaaaaattaaccaggtgtggtggcgcacacctgtaatcccagctactgaggaagctgagtcaggagaatcgcttgaacctgggaggcgtaggttgctgtgagccagtattgtgccattgcactccagcctgggcaacagagcgagactctgtctcaaataaacaaacacatctgaatttaccatttgaaaaaatatatttgtgtgaccatgaggtcaagagattgagactattcctggccaacatggtgaaatcccatctctactaaaaatagaaaaaatagatgggcgtggtggcacgcatctatagtcccagctactggggaggctgaggcaggagaatcactggaacccaggaggcagaggttgcggtgagctgaggtcgcgccactgcactccagcctggcgacagagtgagagtccattaaaaaaaaaaagatataatgtcagtaatatattattactagttcatttttgaaggcataccaagttccagatatttttctcagtgttttacattattcttttgaggtagacactattattcttgtttatagatgaataaacaggcatagggtagttaattaacttgctaaagtcagaatcaactgtatattgaagtttgaatagttgtgaatagtataaagttaaaagtgaaaatgttctctctttctcttcctgtatttcccaggggtatccttagctaacagattgttacatgttctcagacttgccttcccttcctactccctgcctcactttgcttccttctttctgggtaaacataaatatttaccaaaagtgttgttttaaactaaatagagaacttatatacatatacagccttgtgaatgaaatgcaattttgatatcttatgattgtaaagttgaaaggcagatggatgaacaatgaaaaataacagtccaaaccattgtaatatctcctaaatctggtaagcccgaaggtgcttgtgctaaccttgagggtccggtccactagggatttcaaggaatcaaagaatgctttctcaggtcttttttgttcttcagtgagggtctggagtaaactagctcaaagtaattcattttcagagtgaaggaaggaggtcctttctttgatgatgaagaaatcattacagatttagaaatatttgtatttcatgtgtctgtatctcccactttttagtgagtaatgccagaaaatatctagtattcagacataacgttgtgtttgtaggtaaagtttgtcttctactttgtagtagatgaagtagttattggtcagtaatatgtaggtagttgtgttacatatgagtctggattaaatcttttacaatcccttttgttactgtaatgtagcactgccatatgctgctatgtagattgtgtaaccctaacactatcttttaatttttcatgtaatataattggtctttatgcttaatttttcctcwcattggactacaagaagtcctcatttaaatataatttatttgaagaacatatgagtaattttggaacacaagatgaatttattttagagaaatagtgatgcagtagcctgctatttcagctcgattgtggtttctttgggctttaaatcagctagccttgaaacctcattattgtgtagtccaaataaagttggacctgcttgctttctcactgggcgcccatctcattattgtatatgatctaagataaatgcacmtgagcacacattacctttttttttttaataagtaactagggaaaacatcatagaataaaacttctacaaaatcatctttgcatatctttctttccaaccaagaacaactctcacacagctgtcactggaaaagttctcttttccaactcctcagctttttactgttgttccctctttcacatactgctcaattttttctcttccaagagtagctttctggtctgtctcatgtaaataaatttaggctctgtttcaagagttttataaatgaaggcaatagggatccttgtgatgatggaacaattctctgttatggttgtggtcatgatgttaaatgaatctgcacattacaaaattgcatagaactgcacagccatgygcacacatatgcacacaaatgagtatatgtaaaactggtgaaatggaaataagctttgtggtttgtacttaatgtcagtttcttggttttgaaattatactgtaactatgcaagatgtgacctttgcataacatcttgaaaccaggtgatgggtcctcaggggcctccctgattttgttttttaatgcaatttcttatgaatctgtgattatttcaaaatgtttaaaaaaaagtagataagttggaacatggcagcacaagtgagagagattagagaatcacttgcttttttttttctaagacaaaaatctctatcttactcagcattgtgctgaaagccatctttatttatttgtttattcttttcctgacacaggatgtcactgtgtcacccaggctggagtgcagtagtgcagtcttggctcactgcaacttccactccctaggcttcagtgatcctcccacctcagcctcccaagtagctgggaccacaggtgcacaccaccatgcctgactttttttttttttttttttgttaaagtagatatgggrtctcaccatgttgcccatgctgttcttgaattcctgagctcaagcaatccacctgccccaacctcccaaagttctgggattacaggcatgagccaccacacgcagctgctgtctatttttaattcagatatattaaaatttttaaaataaatataaacagaaaaacaaaagcagtagaaaatttaggtagaaaatactctgaataataaaaaagtaaatataaaagatgattaaaatagaaaaggtatttttaaaactagagaaaaagtaaaatatacaagtttatgtaaaaataagtttagcatgctcatctcagttgtaataaataaaaaaggataagattgttaaatccagagagctacacaaataaaaaatatgaaaaattggttaaaatgaagaaatgattaataagataaattcagctacttagacacagtaaataatacagtacattcataaacttaaaaattaaataggcaatatgttcaaacaataaaaatgaataattttaggttaagaaaaatatacaatttcattagattaaaaactagtgactacccttctcttagtgataagagagttgttaattgtggggacaattgattcatgatcacctttttaatttgttgaagttgtggattactatttatattgtacttaacctttgcagttaaatgctggattactatacaaataccaactcagggccaggcgcagtggctcatgcctgtaatcccagcactttgggaggccaaggcgggcagatcatgaagtcaacagatcaagaccatcctggccaacatggtgaaaccccgtctttactaaaaatgcaaaaattagctgggtgtggtggtgtgtgcctgtagttccagctacccaggaggctgaggcagaagaattgcttgaacctgggaggcggaggttgcagtgagctgagatggcaccactgcactccagcctggctaccaagcgagactccatctcaaaaacaaacagacaaaaaaagcctcagtaataaatttaaacaaggattcccttggccaagcatggtggctcacacctgtaatcccagcgcttgggaggctgaggcgggcagatcacttgaggccaggagttcgagaccagcctggccaatatggttaaaccccatctctactaaaaataactgggcgtggtggtgcgcgcctgtaatctcagctactccggaggctgaggcaggagaaycacttgaacttgggaggaagaggttgcagtgagccgagatcacgccactgcactccagcctgggtgatagagtgagactgtctcaaccaaaaaacaaaaaagattcccaaagtacctgtggttcccaaaggaagcagtcaattattgtgaatatatttccaaataaaaatctaccgtttcacctgctttgcataaaatctgttagcatcttcacattagtagtagatagaccaaatatattcatttataagacttgcatggtcttccctttgtagccttatgaaccaccatcattaccgtgaccccttcccaaatcttattcacaatttattgctgtaagtttctttgagttcttacaaaaaaatactgtattttcttctgcctagttctattgcatatactgttctctctgcctagaaagttttcctagttaacttgactcatagttcagatattactttatgtcttcatgaaagggctgtctacacccatggtcttgattgaggaaagtacttaataaattttcstaacttcatttatcacacatgaaatgtaatatattttatgttgtttgatgaccatcagtctctcctcgtagactgtatgtcccatgaatacagtcgtcaggattggttttgttcagtgttgtgaacaataccattcctccattagtggaactccgaatagcattctaggaccaccagcctacttttaccaaattccacacatactcaagtcctgaagttggccccgtagaacacactcataaaaagtcagccctctgtatacacaggtttcacatcccatgaacactgtatttttgatccatgttctattaaaaactacgcatacctatgcatttcaaacctctcttgttcagcggtcaactgtatattatttttactgttttattgctttgcctctgtgctgtatttcctctgacttgacttccagtttaaattttttttttttttttttttttgagacagagtctcactccatcacccaagctggagtgcagtggctctatcttggcccactgcaaactccacctcctgggttcaagtggttctcatgcctcagcctcctgagtagctggaattatagatgcatgtcatcacgcccagctaatttttgtatttttagtagagatggggtttcaccattttggccatgctggtttttaactcctggcctcaagtgatccacctgcctcggcctcccaaaggggtgagattacaggcgtgagctaccatggctggccagacttccagtttacttatcctttttattggtatctaataaacttttatcaattcattgctttttgaaaatatgtctattagtcttttatttttagaagctctgtgtagttctttttcaattttacttgctcatttaatttgtttctaaacgtatttctaaacttacctttatttcgttaaacacaaagtacctcaagttagtctgtgttaatctgtatctgctaattcctatgtctaaaatttttttgttttctgtcttcattggttctcagtcatgtgaccttgtttccttgtgtatatttttttattctcgcccctccttactaggatgagatggttaggggagatttttgagaatgatttaggtctagaatggaggtaggtttctctagagaggatttgctgttgtgtctgctgtatatctggggagatggcactgatggccttggactacattaaattgaaagcttgaagttttttgtatcactaaaatgatgtgaatgaattcatactgggactggtttgtggttacggcattcaaggatttttttttaagccgtatttgctcggtgctaacctagctttccttgcagacctgtgaaggtaaaaagaattagggtaggtttacttctggtactctgttatcccaatgagtagttagccctttgtaggtctcttgttagtcttctttgcatgaacagagggtgattttatgttctatttttgtttccccacaaggctctataaacttgattttgtttgtccccattcagcaaatgctctcagggtaaaagaagaaaagtctatataccattccagcttttttcatacgacccagttttgaagtaaatgaaattaatgttgtctaggaattataatagacctcaaacttgttttatacaaatttaatacatatattggaattattcacgttagattatgattggttatagtattaatggttataggctgggtgcagtggctcacacctctaatcccagcactttgggaggccgaggtggctggatcacctgaggtcaggagttcaagaccagcctggccaacattgtgaataataccaaatataaataccactataaataccaaaattagctgggcgtggtggcaggcgcttgtaatcccagctcctcaggaggctgaggcaggagaattgctggaacctgggaggcagaggttgcagtgggccgagatctcaccactgcattccagcctgggtgatagagcgagactccatctcaaaaaaaaaaaaaaaagaaaaatttctgtttgttaaggcacagttcagagaagaacagaatctatatcaaatgttaatgtaatatatatagatgtatattaaatatgattgcttacatatctagtcataaatacagcaccagagttgggagaaatatttaatgtatataaaaattttgggccgggtgcggtggctcacgcctgtaatcccagcactttgggaggccaaggtgggcggatcttgaggtcaggagatcgagaccatcctggctaacatggtgaaaccccgtctctactaaacaaatacaaaaaaattagctgggcacggtggcgggcgcctgtagtcctagctactcaggaggctgaggcaggagaatggcatgaaaccgggaggcagagcttgcagtgagctgagattgcaccactgcactccagcctgggtgacagagtgagactccgtctcaaaaaaaaaaaaaaaaagttggttctgcagctcactagctgtttaattatgggtgactgcttaactccctctgtaattctattttcatatctctacaaaggagaaaacaataataccaacttcatagtaatgttgtgagttttaaatgtgtttacctatataaaatccttcaacgaattcatagtatttcttggcactattactatgcaaaagttatttgactttgaaaaatgaaaaaagttatttcgaacagtagttggtatttaatcagcaataaaattggcagtatgattatcatgacaatagatcaatcaggtaaggattttaaaaatctgaaaaaacataaaccctttrgtatgtatctaatgatattgggtgagaatagcttttcctacatctgccactcacaaacaataamcccacacacaagtcacttatctcatgagtcaggtcaccttttctgcaaaatggagrtaataaggatgttacagaaaagtatttggttgtgagattccattgatagagaagtgagaaaatcattttatgtgaataatatattaaaatcttattctttttgtcttcttttataggtataaatttttatgacatcgtaggatgcttgtcatatagaagtaataagtgctttactttttagttacaagctttcaggatggggcagaatgtcaagagtttttaaaaaccctaaagttttaaaaaatttatgtagatactctttaccagttatcaatctgtaatgtcaggtatctgtcaattattcttttagtgaatttacagtattacaaaattcatcactattttcctcaattctgtattttatctatacctaactgtktagcgcttctggaaaatactaggtgtttttacatgtccmttcttttattcatacttttcccccacctatgaagccttttcacctatttctgctaattaaatctctaaaaatccagggtaactcatatagttcccgcatttcaaggattccattggttgcaatcagagactcctctttgtaagtctaatgctttttataaaaagtttcaacatttacatgaggccttgagatacagttattgctaatacatgcctggctatcctactattctataagcactttgaggacagggattgattatgtcttatttatattttttactttcttctccccaagtgctagagcacaatatcttgaacatcattgacacagagtgtatgagaacgcaaaactggtatcgataacttctgttaacagacttttgctccataccaggcattgtgtaaaaacactgtcttagtccacttggcattgttgtaaaaggaatacctgagactgggtaatttataaagaaaagaagtttttttggctcatggttgtgcagactgtagaagaagcatgatgccaacatctgcttctggtgagggctttggggagcttccttttatagtggaaggcaaaggagggcaggcatcacatagggagagggaaggcttttttttttttttttttttttttttgagacagagtctcactctgtcacccaggctgaagtgcaatggcgtgatctcagctcactgcaacctctgacttctggattcaagtgattctcctgcctctgcctcccaagtagctaggattacaggcacctgccaccacgcctggctaatttttgtatttttagtagagacggggtttcaccatgttggccaggctgatcccaaactcctgacctgaggtgatccacccgccttggcctcccaaagtgctgggattacaggcatgagccaccgcccagactctctttagtgatcagttttcctgggaactaatagagtgagaactcacccattatcttgaaaaggacaccaagccattcaaaggatacgtccccatgacccaaacacctccaattagaccccacctctaacaatggggatcaaatttcaatatgagatttggagaggacagacatccaaacagtatcagtcacctttgtatgaatttatcacaacatcctgaatcttcacaacatccttattatctccattttgcagataaggtgacttgactcatgagataggcgacctgcatatggatttactgtttgtgaatggcagacctaggattaagctatcctgacccaatgtcattatatttaaccaagtaaactatttgtagaaatgaatcatatctctggattatgtaaagctttcttgttagtsatggtgtaaactgagagccagttttagttcagatagccagtatatcttcatagtctcatggattggagagatgactttatcaattctcagagttgactcagtgatacctgcttaagatatctgccctggtcaaatgccaggactttttgatgtcttgatgacatttgaatgcctttttttttttttttgagatgaagtctcgctctgtcccccaggctggagtacaatggcgcgatcccagctcactgcaacctctgcctcctggtttcaagcgatcctcccaccaagtagctgggattgcaagcatgcgccaccacacctggctaatttttgtatttttagtaagtggaggtggatttcaccatgttgtccaggctgatctcgaactcctgacctcaagtgatctgcctgccttagccttccaaaatgctgggattataggcatgatctattgcacccagcggtaatttctcttgttttgagatggagtcttgctctgttgcctaggctggagggcagtggtgcaatctcagctcactgcaacttccaccccctgggttgaagagattctcctgcctccgccgccggagtagctgggattacaggtgcccacaccacgcctggctgatttttgtatttttagtagggtgggggcgtttcaccacgttggccaagctggtcttgaactcctgatctcaggtgatctacccatctcagcctcccaaagtgctgggattacaggcatgagccactacgcctgccctgtaatttctttttttctttttcttttctttctttttttttttttttgagatggactctcgctctgttgcccaagctggagtgcagtggcgcagtcttggctcactgcaacttccacctgctgggttcaacaattctcctgcctcagcctcccaagtagctgggactacaggcgtgcgccaccatgcctggctaattttttttgtctttttattagagtcggggtttcaccatgctgggcaggctggtctggaactcctgacctcgtgatccacccgcgtcggcctcccaaagtgctgggattacaggcgtgagccaccacacccggcccgtaatttctttattgaaaaatttttacaaggaggcataaagttggagttgacaaaaatacaaaaattagccaagcatggtggcaggtacctgtaatcttagctacttgggaggctgagacaggagaattccttgaacttgggaggtggaggttgcagtgagctgagatcatgacactactccagcctgggtgacagagtgagactctgtctcaaaaaaaaaaaaaaaaaaaaattcttttcatttgttctatactgcagaatagtaaaagctcattaaaaatgtcatccctgaggggccaactttacttttggtgtgaaaatatgtatcatggagggccgggggtgtagggggacctaagtcctgaaattttaggactttcactttttcccaaaactgtattactcattagcagatgaactttaaaactgccttttaaaatgatattttagttgcgctaaattatggtatgacactgaatgatacgataagtctcttaaaaatagtagcmaagtagatagaccaatagactgttaaaagaaaaactttcagacaaattttacaatttaactgagcaaggaaaaatgattcacaaattgggtagcccttagagcagattcagagaggctgtggtactgctgcatggtcttagagaatttacggacagaaaaagaaaagtgatgtatagaaaatggaaatatgaggtacagaagtgaattggttatagtttatttgctttatttggcaaaatgaacatggtttgaacagttggttattcatgagtggttgaagtatggctgctgtggttggctgagatttagctattgttacagaagcatattgctaagtgagaatttgcttacctaataagttaggttgcagttcatacataagaacccaagtatgctttagggctgtttcaggccagattttgatttaacaaaactagtgtcactcataggctttagagcctcctcttcatttatcttatgtttccccttttcatggctttattttagttgcttctcagctactcagagaaatctctgtatcttgtagtatctaatcacactttaaaaaaatgattcatttcccagtgggcagagtagcacacagctgtagtcccagctacttgggtgactaagttaggagaatctcttgaggccaggagttcaaggctgtagtgttctataattgcaccactgcattccagcctgggcaagatagtgagaccccatttactgattataagatttaaaaatatctgctgcatgatttgtgaaaaacacagaaagtcgtaaggagtaaaataaatcatctttaattttttttaaagttaaccacggttaagagttgggtctgtttccttttattccgtatgtacctttttccctgtctcctttaattagtactgagttaaagaccgtgctttacttagtacttgagtatgatttctggaaaaaaaaattactggttttataaaaatgtgtgtacactaaaattcatttattttaccatgtacaattttttgagtttgggcaaattcatagactcaggtaaccactgccacaatcaagatacaaaatagttctcttaccttaaaaattttcctgtgctgcccccttgtagttgtctccctactcctaacctctggctagtttctgcatttttcagatcattgtataaatgtaatgataaagtatataacctttcaaagctggcttctttctttcattcattaattttgagattcatttatgctgttccatagattggtagtttgttccttttttttgtttttttttttttttttgagacaaagtctcactcttgttccccaggctgcagtgcaatggcacaatcttggctcactgcaacctcccgcctcctgggttcaagcgattctccttccttagcttcccgagtagctgggattacaggtgcctgccaccacgcccggctaatttttgtatctttagtagagacagggtttcaccatgttggccaggctggtcttgaactcctgacctcaggtgatccgcccacctcggcctcacaaagtattgggattacaggcgttagccactgcacccagccagtttgttccttttattaatgagtattctgttgtatggatataccacagttagattatccattcacccgcyaacagatacccattctacttttgagtgattttgaatcatgctcctaaaaacatacatatacagatttttgtgtgaacatacatttttattttatttgggcagatatctaggaggggtattgctggattgtatggtaagaatatatttaattttataaatagcagctgccaaactattttccagagtagctgtactatgtttaattcccacttgaaatgtttgagagttccagttgatctgcatcctcaccagaacttggtattactagggttgacttttattttttataggcatactgttagatatgtagtggtacagcattgatttaattttttttccccttgtggtaataggtattgaatactattggtgaacttttttaccgtctattttytttttggagacatgcttgtttaaatcattttttgttgtttttcttatttttaagttgtaatggtttcttttcaactttgaatgtatgtcctctttcagatacatggccttctaccagtctgtagcaaaagatcttaattatcatgaagtttatgtttttatttctttcatgggtcagattttggtgtcatacctaagaactcattgctgtgatcacaaaggtttttttcagttctcttttacgaatagccatgcatcacttaatggaggggatacattctgagaaatgtgtccttaggtgatttctttgctgtgtaaacaccacagagtgttcttacacaaaccaagatggtttgcctactatatacttaggctatatggtatggcctgttgttctgaggctacaaacctgtgtagcatgttactgtactgaatattttaggcaattgtaacacaatggtaagtttttgtgtatctaaacatagaaaaggtacaaaaaaatatgatataaaaggtaaaggaaatactatacaggttacttaccatgaatggagcttgcaagactggaagttgctgtaggcatgtcagtgaatgagtgggaagagaatgtgaaggcctagaatgttactgtacactaccgtagactttataaatgctgtatacctaggctatcctatatttgttttgtttggttttgtttcttgagacagggtctctatctgctgcccgggctggagtgtagtgttgctgtcttggctcactgcatgcttgacctcccaggcccaagtgatcctcccacctcagcctcccaagtagctgggagtacaggcacacaccaccacacctggctaatttttgtaatttttgtagagatagggttttgccacattacccaggccggtcttgaactgctgagctccagtgatctacccacctcagcctcccaaagttatgggattatagttgtgagccattacgcctggcccactaaattaattttttttaaaaataattgcagtacagtgttataatggctgtgcagtgtcaccagataggaatttttcagctccattgtaattttatggcactgccttcatatgtggtccgttgttgactgaaatgtcattattcagcatatgactgtactttagtttcacattttacattcaagctaagatgattagagtagaagcagcgatgtaaggtatatatattaacaaaatctttttatgtatatattgtctgtatgtgtatgtgctttattaatgataccagaaaaacaaatgaagtcaccagccaacctaggctatatgtacttcattagtccatgtgttagcatacattaaaatctgtttttttttttgttttttttttgagatggagtttcactcttgtcacccaggctgaaatgtaatggtatgatcttggctcactgtgtcctccactttctgggctcaagcaattctcctgcctcagcctcccgaggagctgggactacaggtgtgtgccaccatgcccagccaatttttaaaaaaattttttgtagagacagggtttcgccatgttgtccaggctggtctttaattcctgagctcaagcggtctgcctatcttggcctcccaaagttctgggattgcagacgcgagccactgtgcctggccaaaatcagttatttttttaatgcaggttgagtatccttatccacaatgcttggggctggaagtgttttggattttggattttttcaggttttagaatattttcatatacttgagatatcttggggaggtgacccaagtctaaacacaaaatttgtttatattttgtatacaccttatatacataacctgaaggtaattttaaataatattttaaataatggtgtgcattaaacaaagttgtgtacattagaaagcaaaattatcactattgcagccacccatgtggacagtcatggttatcaccatttttgaatctgaaattatatgctattgataagtaatcattttcttatatttattcacacaaaactactgaacagtaaaaatatgaaatatcattagtacagtgaagaaataatgtgttcactgtaactaatcagcacagtagcattaccagaatacctgtatcagatattaacagcaagaacagacaacaggctttcagtctccacctctgatgctgtgttttgattaaaaggttactgtacattgtatttcttttaggtgagaagaaagcttagaagcatttgaggaccaggaagtgggtcctctagtgatgaggaggtattctgctagatggctttttaaaatgttttccccagtgtcatctgcctcattaacaatggtttttgtcttagaggtctctctttgattttataaactgacatgatttcttgttctgttatgaatgcacaatgctttagtccttcagtaagcccatcacacatttttaccatgtcatgcataggcactttttcctgcagtgtttaacaatgtcatcttcattgtcacttattataatcactttgactcagaaccattttggctatttcactattggttaatgaatgaacaattggaatatcattatcagtgtcaaagtcgtcttcgttatctacttcctttagcttactgatggacagtgatggaatttgttttgcatatgtaagaaggttggaaacttttttctcacttgacatacagaattcttcaaagtcaccatttgttcaccatcatcactgaatatagttacaagtcaccatttgttcaccatcatcactgaatatagttacaggcacacataactgcatcattagtaactgtgtccaaagcgttggcaacagcgtatgtggcatcttcaccttttttgaaaaccttccacacctacagttctgttttactgctgttagcatgtcgttcaagaacgtgtgttaatatttactcgttattgatctaaagataccctggtcgcatggctgaattaatgaagtcacatttgggggaaagtacatgacacgaacattatttttaatgagaatttcagctgaaggataattagaacagttgaaggaataagaaaatcttgcagtcatcattctgtccagcttctctgcagtgaacatgagctactggtagagaatgtttgtgaaaccattcaaaaaagatgtcccattccttttcattagcttaatatgggctggtaagaaattcactcctcgaaaacagggaggacacaagtttttgcctgtcataggaagtgtacatttatgtatgcatattgtattaacgtatsccaacacagttattctgtccttggcatccttaatgcctgtagaggctgtctcatcagctgtagtcagtgtctttctagggcagtaacgccacaacattgatgtttcatcagtattatagatttgttctggcgtcagattttcataagcaatgaccttggcaaatttgtcaatgaatttctctactgcttcatgatcagcagatgctttatcaccataaacctttaaaaatgcaatgctgtgccttttcataaatttgtgcaacccacctattgagtatttatagttcccttcagtttttcagctcatccggatggatatttgcttgtgtcatgatcagaataccattaagtggcatttgttcactgtgacactgttggattcattcttttaatacacagttgaaatcttcatttttagctttgtacagcatttctcactaacttctgtttatgaatttcagcatgtaactaactgtcttttgtttcttctactttttttttaagatggagtcttgctcttttcgcccaggctggagtgcagtggcgcgatttcaactcactgcaacctccatctcctgggttcaagcgattctcctgcctcagcctcccaagtagctgggatttcaggtgcctgccaccacgcccagccaatttttgtatttttagtagagatggagcttcaccatgttggccaggctagtctcaaactcctgacctcagatgatccacctgccttggcctcccaaagtgctgggattacaggggtgagccactgcgcctggcctatccttttgtttcttcacgttatattaatatatggtggtcatgccagcaccatactgttttgtaagacatgttacagttacactgctgtccagtttctctaacaacttgactttctgtgatataaacataaatgccttctctctttttaataaccgttacccgtaggaatatctgaaggactttttgacattttcaatagtatctttacaccacagagcagagaataagtaaaaaaacaaaaaaccacacacacacagtgagcaatgcacataggtcttggctccatgtggagcctgccattgtcatgtcctgcctgtgtatgtgccattttggccaactttatgtgcacacatgtgtggggtaatctgggcgtattcagaaaagatatattgcagctaaagggggctgagagggtctttttttccctcagggttgctgaataaactgtgtgtttgtatgcctgcattttgtctgtgaattgtcacatgaggtcaggtgtggaaattcccacatgtggtgtcattttggtgctcagacatcagattttcagattagggatgcccaacctatatatgtgtaatttacttattatttatttatttatgaaatgaagtctcactctgtcacccaggctggagtgcagtggcgctatctcagctcactgcaacctccgcctcctgggttcaagcatttctcctgcctcagcctctcaagtagctgggactacagggactacaggtgcatgcctgtaatgagaatttcagctgaaggataattagaacagttgtcaaggagtaaaaaaatcttgcagtcatcattcagtccagcttctccgcagtgaacctgagctactggtacaaaatgtttgtgagaccacatccggctaatttttgtatttttagtagagacgtggtttcactatgttgtccaggctggtcttaaactcctgacctcaagtgatccacctgccttgacctcccaaagtgctgggattataggcgtgagccactgcgcctggcctacatttaatttttttttttaaattagagatggtggtctcactatgttgcccaggctggtcttgaactccctgactcaagggatcctcccatccctgcctctgaaagtgctggtattacaggcgtgagccagcacacctggcctcaacctatatacttaatgtatttcttgtttttgcatctactctagtcattatctcagcctgcaatgtgttttgttcattcctccaccattttctcataccgtgtatatgcaagtgttattttttcaaggtttagttgaagctctattttttttgtcaccctcacttttcttgatcttatgtctaagaatgagaaatggtttaaagaaaaatacaggatatagctagtatataattgcttacagcactgtttcctaagatgtctgtatttgccttagtgcagcaagtctcttcagtgaatctcttattttgctcctttacattggtgtatacagtaccatcttctccctgttgggctggctagatctgttaggcaggtggtaaagtggtatctaccagcttgtagaatggtaatagaaatatattttttgtttttttaccataaacaaggggcctcttgggatgaagaaaacatatttgctcattctcacatcttcataaagtgaaacaataatctttcatactacacaagatgaagaattaaactaaaggctgggtgcagtggctcacgacacctgtaatcccagcactttgggaggctgaggcgggtggatcacctgaggttgagagttcaagaccagccagaccaacatggagtaaaccctgtctctactaaaaacagaaagttaactgggcatggtggcacatgcctgtaatcccagctacttgggaggctgaggtaggaggatcgcttgaacccaggaggcagaggttgcggtgagctgagattgcaccattgcactcaagtctgggtaacaagagcgaaactctatctcaaaaaaaaaaaaaaaaaaaaaaaaatctaaggagcagaaagatatttgattattcaaaatgtttaaagtttgtagtggctaatgtagcatgtgtagtcagcccttaagcttccttgaaatgatgccactatatctaggtctatcttagyggtgcctacttaaattttatctgaaaagtttcaaaaacagccaggcaacaacaacaaaacaaatcattaagatccaaatcaagggctgagaatggtggctcatgcctgtaatcccagtactttgggaggctgagatggaataatttcttgaggctaagagttcaagagcaacctgggcaacatggtgaaactccatcttataagaattttttaaataagctgggcatggtggtgcacatttgtagtcccagctacttgggaggctgaggcaggaggatggcttgagcccaggagcttgaggctgcagtgagatctgattgcaccagtgcactccagcctgagtgacaaagtgagactctgtctcttaaaactgatgatattcagatttactctaaagagctccagataaactctttagaaatagtatttctgtttatttatgttggtcttttaccgctgtgaaaagaaaacttgggttagtggtcagctgacatgggttttactctcagctttctttatgaagattatgagcttgtatgttatttaacctcttatagttttacttgccacatcttcatcttgagattcttatggtgattaagacaatgaatatgaagtggttttagtttacaattttaaattatcaaatactttgcgaagagatttcttactatagtaataacaacagaatgtcactaaatataccttacctctgggagaaaagggcatgagagcatgatcacacatcttctggctcatcagcttgctcttcctcaagtggtaggaagaatgagggaatctgtaatctatatgaggcttccccaaggaacaggactgccactgttagtggattactgtgaggaacaatagcggattttttttcttttctttttcttttcttttcttttcttttcttttcttttcttttcttttcttttcttttcttttcttttcttttcttttcttgtcctctcctcccctcccctcccttcccctcccttctcctcccttctcttttctcttctttctccttccctctctctctccctcccccccccccgccttctctttctttctgacggaggctcactctgtcacccaggttagagtacagtggcaagacctcggctcactgcaaggtttgcctcccagtttcaagcaattctcctgcctcagcctcccgagtagctggtactacaggcgtgtgccaccacgcccggctaatttttatattttcagtagacatggggtttcaccatattgaccaggctggtctcaagtgcccagtctcagtggtgcccgtgccggtctcaatggtggagtttctatgattttacaaagcatttcttaacttggaagttaagagggctagagttggccaggcatggtggctcacacctgtaatcccagcactttgggaggccaaggtggacggatcacctgaggtcaggagcttgagacgagcctggccaacatggtgaaaccccctctctactaaaaatacaaaaattagctgattgtggtggcgggcacctgtaatctcagctacttgggaggctgaggcaggagaatcgcttgaacacagaaggcggaggttgcagtgagccaaaatcacgcaactgcactccaggggcaacagagcaagtctctgtcttaaaaaacaaacaaaaaaagagggctagagttgaatgcagtgggcactaattaggaattagcttttcctggctcacactctgtttatttgcattcttctataagggaaaatgacaagttgatatcggattgtcagggttttctaatataggatttgtgtgaaaccaagcagccataacaccttgatgatgtcattgagacagatggtgagtgctgaccctttataatatttgtcctttgttttttagattaactatctcattcttcttttttatttattctatagattttaaagtatcctaggaaatagctttagggatcgtgatgtggaaactaatggaaaattaaatgtattattaggattgaaatctggrtaagtagttttatttatttattattattttttgagacagagtcttgctctgtcgcccaggctggagttcagtagtgcaatcttggcccactgcaacctctgcctcctgggttcaagcagttctcctgcgtcagcctcccaagtagctgggattacaggcacatcccaccatgtccagctaattgtatttttggttgagacggggattcaccatgttggccaggctggtctcgaactcctgacctcaggtgatcctcctgccttcggcctcccaaagtgctgagattacatggttaatacaattttaagggtggtattagatatttgtgtttcatagacgtggtttttttctttttttcttattttttttgagacagggtctcactctgtcactcaggctggagtgcagtggtgcgatctccgctcaccgcagcctccgcctgcgaggtttaagtgattctcctgcctcagcctcccgagtagctgggactacaggcacaagctacctcgcctggctaatttttgtattttaagtagagatgggttttcaccatgttggccaggctgttcttgaactcctgacctcaggtgatctgtctgtgttggcctcccaaagtgctgggattacaggcgtgagccacggtgcccagccaaagtgttttttttttaggaaaatattatgccaggcgccgtggttcatgcctgtaatctcaacacttcgggaggccgaggcaggcagatcacttgatgtcaggagttcaagaacagtctggccaacatggtgaaaccccgtctgtactaaaaatacagaaattagctgttgcagtggcaggtgcctgtaatcctagctacttgggaggctgaggcaggagaatggcttgaaccctggaggcggagcttgcggtgagccgggattgtgccactgcactccagcctgggcgtcagagtaagactttgtctcataacaaaacaaaaaaacaagtatgatggttcagattgcacattgcagtgaaaatgccaacttttaaggggaattatatttggaatcaattttctttttaactgaatattaaatggaatatttagctttttaactggaatattaagcacttctttatattctcaacatatggtagtgcagaggtctttttttgcattgctttgcccccatgcctacattatcaccatttttaaacagggtatccaggttgtttgtcttacagctttcattgttcaggttgaagcaacattctctgatrayaacattcagaggcactttgacagactgctgtgtctgacctggaacaacaatctctgatagcaacattcagaggcactttgtcagactgctttgtctgaccttattacctgtgaggtagtgtctccatttttctgggtcagttcttttttgtgaaggactggaactccttagttaggaacaagatttttttttttttttttttttttttccaaagacagagtcttggctgggcatggtggctcacgcctgtaatcccagcactttgagaggcagaggcgggaggatcacctgaggtcaggagttcaagaacagcctggccaacatggtgaaaccctgtctttactaagaatacaaaaattagccggatgtggtgatgcgcacctgtagtcccactacttgggaggctgaggcctgagagtcgtttgaacccgggaggtggaggttgcagtaagctgagatcacgccacccctccaacctgggtgacagagcgagtttgagtctgtgtctcaaaagacacagtctcattctgttgcccaggctggggggcattggcacaatctcagctcgctgcaacctccacctcttgggctcaggtgatcttcccaacycagcctcccgagtagctgggactatagcacataccaccacgcctggctaatttttgaattttttgtagagacagggtttcaccatgttgctcaggcgggtcttgaactcctaagctcaagctattcacctgcctagacctcccaaagtatttggtggaacaagatttaacaacaaaatagataattttttaaaactccaaaatctctgtagtgtattcctgacatatagaagtatagatcatattcatctgtgttcattagtattttaatgaacattaaggtggtatgatttgatttattaaatgaaatccaaattacatgtcttttccctaatgtaaaaagagttacatcagtcatttaaaattgaacacaaatttatattcggaagaaaacagaaaaaaccatgtcctctgtctcctttattcatcaaaacttgtgattctaatcacatttaacagtactgaaaaagtggtacatgctgaagaataatggagtatgtctaccacctcttcttgggtcagcatctaatgtattttgtgacaagccttgtgtcagtacagtctctgaaggttatttaggagtgcagtgaatcacttctgttacttactttctttttatcagtataccaaatagcctctgattctaatacattattttttttaattgatctgctttgtgttttcattttggtatttggatttagaaaactgtctatagatacagatattttgctggaaaaattgtatttaaatattcaaaatttaactaagaaattatatcaaggtgaaatgacccttatgtttcatttgcaaggattgtaaaagtctctgacaattttaagtgctcaaatgaagagatagtgtagaagccttttcttcgtttttttacagaagaataattatgtgggcaatgctcctaggtttctgcctcataattgtcatgtagattacaattaaattagaagtttttgcagagcagtgagtgagtttaccacaagatggtaacattttattcagattcatgctttgggagacatttatggtcagtaatagtgttttgcctttctttctctctcttttttcttttttttgagatagggtctcactttattgtccaggctggagtgcagtcgttgcagcctcaacctcgtaggccaagcccttcacctgctccagtcccctaagtcattgggaccacagccaccatggctggctaatttttcttattttttgtagagaggaggttgcaccctgttgcctgagctgttctccaactcctaagttcaagggctcctcttgccttggcctccctaagtgctgggattacaagtgtgagccaccacacccagccctgcctttctcatacgcaagaaataggagaatggatattgtttttcttaagaagctgtattatgtgatttgttttaaaaattttgtatcatgccttttaaaggtcaacagtttttcatttgtagatagaaaaatgctaagaatctattaattttgtatattttactatattataaagaaaaataatatgccagtgttataaaaactgtgtttttcttttaggaaatatttctgttgctaaaaattaagcttaaacaatgctgatagaatatacaggtttgctttttttatttttgagaaatgggttgttattcatggtatgtattgtggtctgataattagcataatggtttaaaactggaaatgataatagaaacaatgaatctaagcctttcacgtgatagatcagtattcctagacagcataagttaaaaatctctacctcatacagctagttgaaaaatcaaatatgtgtaactctcaacctagcatattcttttgaattcctttcatttgaaaagtgattctttaacctataaaaataaatggaacatagagatgattattactttttgaaatctaattgataattatcatcattgatactatttatcaggcatttaagtaayatgtaagatatctccgttttgtaattgagaaacctggaaggttaaatgaggcctaaactcacacaattggtaagttacagagctattactagatctctttcccattcatttctttctctgccttctttgccatcttgatttagttaaactgagtctggcaccaaggttacagtctattcctccattattataaggatccagtattcatcacacaggtgatacttaggtgttttcattatttgatatggtgcttgagatgtctgcatctgaattatcttactggttatatcaatatagagttggtgcatcatattaaattttggggaattcctagaaatcatgaattgacatcaaatttagtgacacatatggtggcttatccagctgaacctttttcttactttacttatataagctgcattttcttgtgggagtcatattttgaggtccacttagaagtctgatgtcatgcctaacttagacttcatctagtcaatgttaatatagagtttggttttgttttttagttagggtaaatggtataatattagaaaaatgttggctattgtcttttgtggaaagcaagaagttaactggtttttaagatacgcatattaatatttaagtgaagaataggcagttactttctgagcatgtagtgaatatgggtagtatgtgtataccctgggaatatacagtaatctgtggtatgttggttgttaaaaggtcgggtgctgtggctcatgtatgtaatcccagcactttgggaggctgaggcaagggatcacttgagggtcaggagtttgaaaccaggccggccagtatggcgaaaccccatctctactaaaaatacagaaaaattagttgggcgtggtggcacatgcctgtggtgtggtcccagcttcttgggaggctgaggcatgagaatcacttgaacctgggaagcagaggttatagtgagctgagattgcaccactgtactccagcctgggcaacagagcgagactggctcaatatatatgtttatttattgaagtgttgaacttctctgacattctgttaaaacgtctggatcaccctagaaacaaatggaggcgaacagttttgtgtagactatcagtggatttgtggacttccctgaaatgtatctttggatcgcaagttaaaacctcataatctaaaagtgaaaaaaatagggcaagcaaatgaaaaaccatgtaagcgaatgtattggaaatgtaattcyaattgtgcagtttcacatataattttgtaggacgaggatattgaagtargtaaaattgagatttgataggaaaaaagtaagtaatgagaagtgggtttaagagttttaacagaggattggacatatttttatagggcaagaggtaaagtagaaagctcaggcagaaatgagctgattacatgcacaaaaagtgttaygtttgaaaccagagtctaggagaataataagaaatgaaggagagaaaaaactttgttttagcatattatattttaaatgttggagatactagcattggaaattttctattgatagtacgtattttagaaaacaaattattactatgaatttggaattcaaaatgaaattgatacttgaagataatgaagtcaagtaagtaggtggggagtatacaggtcatagagtaatcgactgtgcagagccttagaggaatgcctaccttgaacagtttatatcagagatgtgagatgattagattctaaaattattttagaaaggaaaaataagaacaataagtcttttggagtaagtgctgtgttattctgggcattttagtggagcattgaagatgaagccaaatttcagaaatacaaagaggaggactgttaaagaagaaatggttttaacttttgattttagaatattatctgtgaaaagggggtggatcattaacatctggtagaagtatcttcagaacaaatgagatataggtaggctaaacaatagaaataatcctaagaagagaaagaaaaaatgataataggagagtaggaacttcaatattttaaatatgtgaacattaagaggaagaaagtgtagatatattcttactgtctttgattctctcccttttttgccattgcctctttatatgtaataaacctttggattctaataaaatttaaaatcatgaatatataatactttcatttttttagaaaagtagaacatgaatggtaaagcattatggtaaactagaaagataccattttcttcttttacataaatagaattatttacatgtgttctcttactaagcatgtacagatgttctttgacttatgttaaattctaaaaaccattgtaagttgtgaaaatattctaaattgaaaatgcatttagtacacttaacctaccaaacatcatagcttagtgtagcctacctttaaacgtgcttagggccgggtgtggtggctcacgcctgtagtcccagcactttgggaggtcagggcaggtggatcacctgaggtcaggagttcgagaccagcctggccaacatggtgaaaccccatctctactaaaaatataaaaaattagccgggcgtggtggcgcatgcctgtagtcccagctactcgggaggctgagacacgagaatctcttgaacccaggaggcggaggttgcagtgagcctagattgtaccactgcatccagcctgggcgacagagcgagactccgtctcaaaaaacaaagcaaaacaaaaaaacatgctcaggacacttaccctatagttgggcaaaatcatcaggcaacacaataaactatagaatttctgttgtttaccctttgtaatagtgtggctgacggggagctgtggcttactgctgctaacccacattgaaagagagtatcaacggtgtatcactagcttgggaaaatattagaattcaaagtatgatttctactgaatgtgtattgcttttgcaatgtcagaaagtcaaaaaattctgagttgaaccattctaagtcagagaccatttgtatatacatatgtggatttgtttttatgtatttgtcaagttagtgtattgttgctgacaagattttttcttttttttttttagtgtttttgtgttggccccgcagttgactttttcagttcatatcctttttttttttttttcaattgatggagatagttttgtttattcacccaagtttctgaataattgttcaggccctgttgctagcttatcctatcacacaaatgagtaacaaaatttattcacagtctgcaaaataccttttaggaatttttgagaagatgaatgctagtctttaatttccttttttctttctttctttctttcttttttttttttgaaataaggtctccctgttgcctaggctggagttcagtggctcgatcatggcttactacagtttcaacctcccaggctcaagccattctcccacctcagtctcctgagtagctgggattataggcgcatgccaccaagcctggctaatttttgtattttttgtagaaacggggttttaccatgttgcccaggctggtcttgaactcctgggctcaagcagttctcccacctcagcctttcaaagtgctgggattataggcatgaaccagggcacctggccagttttttactgttaatagtgaagataatttccagtgcgtgaatacagtgttttcacaagttccactgccactgtggaaatgatagtgtaatcctagatcttgtgaaatacaattaaaatrtaacgtacatttacttactaataaaagtaactagaataaatgtcccaaataaattaaaacagccctctttttagcaaagttaaagtacatattaaactgagttagacatttttgtgtaattctacttmttagctatttattatagtatgttccaggtatttaagttggaatacaaagatgtaaaaacatgtctgtacaccctcaaaatacacagtctaaaagggagaacatttagtttcagatgaaagttgttcccatatttatgcatttatgtatgtgtatgttgcaaatttcagttgtttgaacagaaaattacttctgatatgaaacagccatgataaagtgctcaccagtaaaactggaaatacagacaaaacatcacatgtctataaatataatgttattcacctcatttatgaaatgtgtgtatttcaattcgtaatgaatttgcagtgggagctcttttttaagtatatgcaaaatcaaaggttatcaacatattgccagctttttcccctaatcctctcaaattttttatatatgtgacaagctaaattggatagcatttttatatatttcttttctttctttttttttttctttgagatggagttttgctttagttgctcaggctgaagtacagtggcacaatctcggcttactgtaacctccaacttcggggttcaaatgattctcctgcctcagcctccaaagtagctgggattacaggcatttgccaccatgcctggctaatttttgtatttttagtagaggtggagttttgccatgttggccaggctggcctcaaactcccgacctcaggtgatccgcctggcttggcctcccaaagtgttgggattgcaggcgtgagccactgcgcctagccttactacttttctaaaaaatttcagccgggcatggtggctcacacctgtaatcccagtactttgggaggctgaggcaagtggatcacctgaggtcaggagttcaagaccagcctgaccaacatggaaaaaccccgtctctactaaaaaaatacaaaattagctgggcgtggtggtgcatgtctgtaatcctagctactcgggaggctgaggcaggagaatcgcttgaatctgggaggtggaggttgcagtgagccaagattgcgccattgccctccagcctggggaacaagagcgaaactccatctcaaaaaaaaaaaaatttttctgtgtacccttgatacagtatccttaaaaagcaatttagttgaaagtgcattgacagcagaatgaaaatctgaaacttggattcttccactacatcttctcgtaactttgtgctttaggaagtccatttaccttttgtgagcttcttccttagttgtaactggaaggtgtatatctagcccaaatttattcttctgccagcactaaaaggcttttacttgggggtgggggaaatatacatataatggcaatgaagtaactttctctatttgtttcacccttttagaaattgaatttcagcagataaaaccacagttgtgtaggcttatttacattgatgaagcaaagtattggaatgaaggtgaagcatgtttacatagaaacgtatttttaagccccagatattattattattgtgttctcataacacttgccccttttcagattgtaggctgtcctgttttttgttttagtttttttgaggcgaggtctcagtctgtggctcacgctggagtacagtggtgcattcacagctcactgtagcatcagcctcctgggctcaagcgattctcctacctcagcctcctcggtagctgggactacaggtggatgccaccacaccgggctaatttttgtattttttgtagagatggggtctcactgtgttgcctaggctaatctcaatctcctggactcaagcaatcttcctgtctcggtctcccaaactgctgggattacaggcatgagccaccatgcccagcccctggttttgtttgttttttgttttgagacagagtttcactcttgttgcccaggctggagtgcaatggcacgatctcggctcactgcaacctctgcttcctgggttcaagcaattctcctgcctcagcatcccgattagctgagattataggcacccaccaccacgctaggctgattttgtatttttagtagagaccaggtttcgccatgttggtcaggctggtctcgaactcctgacctcaggtaatctgcctgcctcggcctcccaaagtgctgggattacacgcgtgagccactgtgcctggcccagctcctggtattttaagtaatgtgtcagtgtccaatgtctgtccacctctccgcctccaccagtctgatgtggaccttcagtatttcatgttaggctttataggcagtatcttataacattactgatttcttgccattgtaataaattgttaccatattttattatctttwtttatttatttatttatttatttatttatttatttatttatttttgagatggaattgcgctctgtctcccagctggagtacagtgtattttgagtagagacagggtttcaccatgttggtcgggctggtcttgaactcttgacctcaaatgatccgcctgtctcggccttccaaagtgctgggattacaggcgtgagccaccgcgtctggccattttatcatctttaaacacggctttcactgtgttattacacttctcagaaattgttacgcttccccgtcaattacaaatgtcatttcttatttgtcacctattcatgttgctcattgttcctctatgtggatacttcattacgtgaaagatgttcttagttgtactaaaatatattatgctcacatatgcatctttgtcttcattatattgctgttgtcatttaaaataattttttataattcaaaaacaactgtgctatgatggatttagcagttaatatgtaaatggaataaatataagtatgttgatctacatagaatatatgcattaagacattggagggatatggaaacaagtatatgatccctaaaaagttggaaataaggtagttcactgagatttrtagtttattctaagaaggattatgtttaactgtgtccagaataaatgaaatatttttgggtaaattaactgtttatcagttatattataagttaactggatgtcaagtacatacttaaggaatttgagagacggcaccaaaatgtaattgaatttagtaattagatatctaatcagttgtatttactccttttttgagtttagaaggaaagaagaaagttctttttaggctctagatacagaaaagagaggtccaaagagccagaaattgacattgcttatttaaacactgtcggaggaattagctgggtgggtggtgtgtgcctgtggtctcagctactccagagggtgaactggataaaaattgattgagcgcggagattgaggctgcagtgagctgtgatctcctcacagcactccatcctgggtgacagagccaaactcttgtctcaaaacaaaacaaaacaaaaaaccaaaacactgaggtagaagaaaccctattctagtattcttgggcttaytattcccctgttttacgtcatttgtgtttatcaagtaatattttgatttagctttcctaaggaaaagtttgtattatttgttaatccccatgctttctacactaattaacagctaataattatcattttaaagtaataaatttgcattctggtttatatatcagtagctatgagcttgattactaagtttgtccctaataggacatctagtctcagtatgcttacaaaatcagatatctgagtttgtaatattaagaattagactatatatatctttgtcattttatgagaataaaggccacctatgatggctttaggtagatagccagctgacagtaaaaatgtatgtttggtttgtatgaagcaagctaaggatttcatgactccagcaatttacaatttaactcaaaatctagctgaaagcctagttcaagttctgtcttttctattaaatgttttctgattagacttacatgcagtgactacccagtataaaccaccaccctggaacctcttttcttcccgaaaatgcttatttttctctaaatcacttatcaccatctgacatacacgtttacttgtttattgccatttctacactcacacaggattatgagctctataggtaggagttttgttaacacactgctttgactttgtggttaccagtgcttgtcacatatcaagttcttaagaagcattcattgaatgaaggaatctgtttaattctgaatctttctttcctctaggcttctttgtttataagttgtagtcaatatagaataatacagggtttgtattgtttgatgtgtataaatctgatctccgtctgcaggaactttcttggagcaagggcctaactttgtactattatctcctccacagaatcttagttggcatttgtgtttgatctcttgatttagatagacacgagtttgatttttggtttagctgtttacttacttttgtgacagtaggtaacttttctgaaccttggtttctctgttttaaggatatacgagatagtgttggttgaggactgtgatggttcattttatgttgtaagcatgactgggccacaggatacccagatcctggtaagatattatttctgactgtgtctgtgagggtgtttccgaagagattagcatttgagctagtagactgagtagggaaggaccacccttatccatttgggcagatattgtccatcctttgggggcccacatagaaaaaaaaaaaaaaaaaggcagacgaaggatgaattggctctttctgagctggaacatccttgtctcctgctttcagatgtgggtgctcctggttcttcatttttcagacttgaaccaagacacaccactggctttcctgtttctccagcttgtgggctgcagatcatgggattttggctttcataatcatatgagataatgagcctatatatatatatgtatacacacacacayatgcaaacacacagagaaacacacacaaatatgctcacactctattggtcctgtttttgtggagaactctaatacaaagacatttgaagattgagagaatgcacaagatggcccccgcaggccattgtactagccatctcattttatatcacatctaagtatgccttgaatttttttagttttatgtacctggccttattgtgctcttatcagtatgacttctggtttttgaatggataacattgttttataacttgtgcttcagaaaataccagtgctgtttctttcccccctttctttttttgaaacagtcttgctctgtcacccagggtggagtacagtggcgcgatcttggctcactgcaacctcagcctcctgggtcaagtgattcttctgcctcaccctcccgagttgctgggattccaggtgcgtgccaccaagcctagtttttgtatttttagtagaggtgggatttcaccatgttggccaggatggactcaaactcctgacctcaagtgatctgtctgccttggcctcccagaagtgttaggattacaagtgtgagccactgtacccggcaccactgttgtttctaggcttaattaatttgttgtggccaacaggcttttccttgtgtttcagctttagcactacctgtccatcatagctgtcattacagctttgttgactttactgtctcgcatactcttacccagtgctgctttggtcttgcccaaggcggcagttctttccttttctctcttctctactttttgttcaacattatctaattttcatatatagatctatgtatgtatatgttaaatttttatatatattaaatacttttcccagctctgcctctgtatttatgactagatacgtaaacaattgttaatatacatcaatatatattaattacattaatattaacatttgatatagattctgttctttcctcaactgtgccttgacaaacttaggaaaaaaaaaaaagttttttttttttttttttgagatggartytcactctgttgcccargctggagtccagtggtgcgatcttggctcactgcaacctctgccttccaggttcaagcagttctcctgcctcagcctccctagtagctgggactacaggagcgcgccactaattttcgtatttttagtagagacggggtttcaccatgttggtcaggctggtcttgaactccagaccttgtgattctccctcttcggcctcccaaagtgctgggagtacaggtgtgagccaccgtgcctggccagaaaattttttaacagttcaaataagtgtaaaaagttaaaccctattctatcttaatttcttgcattttgtattttacaatttagcagctttaaaatcatcgtactgagtcccttccacctaagtcactttccatctcttgcgctcataatatactgcaggttggcatataccttttaactaagagtttagagggggattttgtctttgtagaaatttgaattttccagaggaaaaaaattctgaaaatttagagtccttaggtgagatcctcagtaaactgacatccactcattttaataatattcttttctcttttatgtaaattgataaccaaggcatgtgcaacatttgaaaagagctttcccaacatgagagagaataaacatgtaggaaaaaaagaatagccaggaaaatacaaggaactgttttgaaagctttgggggaaaatcctcttaatatactcagatgagaagatatttcatcattacaatgaatgaactggtttagattccttaaaagacattcaagaagtgtgacttttggcttcctcacccaaggtcagcttcagcagttagaagggaaaactaaatgttctgagcaaatggtgagaaatcccctaggttggtggaagaaaggctgttttgaactggtgtgtggaatagagaagctttgtcccaggtcaagagagagggcatcctcttggctatcagaagaaaaaataggaaaggaactattgaagctcttcacgcctttgaagcaaaggtgcctaactcgcgtacacttgtaaagtatcagacctttgatattttgaggagtcaattcaggatagtgcagaggccctttccttctgagtggatttaaaaaatgaacttttgcttccctacctcttacccagacagttctcagtgctaatacgctatagttggtaagagatgcaggaaaaaccaaaccaaattgttttttccactgtcgactcaacacaacacttctgacaccagatgtgttggggtattttcttacacacctagcagatctccagcagacatgagctggatatcctccaactgaattattttttcacgctgtctacctacagctagcgtcagatcccactgattgaggactcaatctcacaagactgcctcccacttcagatgacaatcgcaagtagtaggttgtcacctatacttctgactgagcagctataaaattcactgatcagctatagaccagctccttctcatgttcaattagtttgctagagcaattcacaaaggtcagagaaacactttacttattatgtttaccgatttattacaaagaatattttaaaggatacaaatgaatagccagatgaagatacatgggatgggatctggaagggtccagagaacaggaactttcatccctgtggagtttgtgtgtgccacccacctggcacgtggatgtgttcttgtacaccagtctggaacctcattcaaactctatttttagggggttttatggagacttcattacataggcatcattgattatataattggccattgttgatcaactcarttcagcccctctcctctccctggaggtctggggtggggctatgaactttccaactctctaaacacatggttggttcccttggtaacaagcaccatcctggggctatctagaagcccaccaagattgcctcattagaacaaaagagtcttctgtcacctaggaaattcctagggatttaggagctcggtgtcaggaaccaggagtcaaaggacaaatattagaacaaaagattctcctagtgcctgtatctacaaggattttagaagctgtatgtcaggaaatggagacaaaaaacaaatatatatttcatgttatcacaatagtcgaagaagagtctccatttagatgctttaacatgtgaaaaaatagtgaagctactttcccaaggaattgttttgagaaaagatgagagattgtagttttctgctgcctggaatattccaccttaggtattttccacctgtatgtcttgagctcaatggggctgacagtgattgtgggctgacatcgtctatatacattgcttaaatgtattttcctagaagaaaatgagcacacagaccaaataaaacattcaaaggaaagaaaaataatatactggattacagatgccattagtagtagaaatactagattagacaaatgatgaatataaaattatcctaataaatgtattaaaaatattagaggaagataatatgaaataaaatctaaaagaaaaaattactcaatatcaaaaacataatacaaaatgtaagatatgctgggcatggtggttcactcctgtaatcccagcactttggaaagctgaggtaggcgaatcacttgaagccaggagttcaagaccagcctggccaacatggtgaaacaccatctctactaaaaatataacaattagttgagtcaggcatggtggctaatgcctgtaatccaagcgctttgggaggctgaggcgggtggatcacctgaggtcaggagtttgaaaccagcctggccaacatggtgaaaccctgtctctactaaaactacaaaaaaattagctgggtgtggtggcatgtgcctgtaatcccagctacccaggaggctgaggcaggagaattgcttgaacctggaggtggaggttgcagtgagccaagatagcaccactgcattccagcctgggcaacagagcgagactctgtcgtggagaaaacaagcaaacaaacaaaaagatgaataacagaattgatctatttgaagaacaaaattgttaattggaagattaaagagaatatttcacggggataaaaggacaaggaaatagcaaatataaaagaaaaattgacagctwtcaaatacagaaataaaggtattgacatccagaagataggaatctaagaagggagataattttttttaagtggagaataaatacttaaagggataaaagggatagttttctagaattaaagtgagagagaaaagagagaggtgagaaatttcagattaaaaggagttcagagtcaagagagaagaaagaaacacaacatacgttaaagttaaaatataagactgccagagataaagaaaatgctaaagacttgcagagatgagggaaaaaaaaaagtcacaaacaaatgaagaagaattagattggcatcacactttttcagcagtaactcttgaatgtaagcagaaaatgtattagctttttttttttttttttttttttagatggagtctcgctctgtcgcccaggctggagtgcagtggcgcagtctcagcacactgcaagctccgcctccggggttcacgccattctcctgcctcagcctcccgagtagctgggactacaggccaccaccacacccggctaattttttgtatttttagtagagacggtgtttcaccatgttagtcaggatggtgtcgatctcctggccttgtgatccgcccaccttggcctcccaragtgctgggagcattttttaaggtttgaagagaacctagattttaaatcccaccaagttgtcattcagatattaaagccataataaaaatttttatcaagaatacagataccagaaggtttttcaaaccttaatattaaaaataagtttagatgaggcactgaaatgagcagacccatttaaggaaacgttgaaagagataaatgaagtgaagatgatgaaatacattggttagtgaagctaaccaaagtatagagaaaatatgtccatattaaccctgaacctaaaagtctaggtcagtacttctcaaattatctatgccraagaaactttttttttttaaattccagtttgtttagaaaatcacaagtattgatgtcccaggaatgttgaacttacgtaagagttctggacatgttattatcagttcgtatatttttggaccagtaacagaatatttaaaggagcaaacaacagaaacagatgcaataatgacagaatgaaggaaatggcagaaaagggcatgattataatatactcagtatactcaaggatttaaagtaaaacattaacataagagaaatgtaaaatataaaaaagactcaaatgaacatttagaggtgaacaacacaaatgaaatcactggatggtgatttcaagatattagacatgggaaaagaaaagatcaagctgggggtggtggctgacacttgtaatcccaacatgtaatgccaacactttgggaggccaggataggaggattcctcgagtctaggagttcaasactagcctgggcaacataaggagacaccatctctacaaaaaagttaaaaattaacaaaaattagctgggcgtgttggcaggcacctgtaattcccagctacttgggagcctgagatgccagaattacctgaacttgaggcagaggttgtagtgagtcgagatggcaccgctgcactccagcctgggtgatagagccagaccctgtctccaaaaacaaaacaaaacgagcgtggtggtgcatggctatactctcagctacttgggaggctgctgaggcaggaggatcacttgagccttggaggttggagtggcagtgagccgtgatcgtgccactgcattccagcctggttgacagagcaaggccctgtctcgaaaagaaaagaaaaaagatcagtgacctttaatgtagcaatagaaacaatgcaaaatgaagcacagatagaatagatgggatggggggcgacggggcacactgaatagaatttcagtggcctttggaatgatatcaaatatttatgtatgcaccattggcattctggtgttggaggagggtgcaaggacaaggaggcagccagtgaaaatatttgattaaataatgtacgaaatgttttcatatttgcaagaacattataaacatgcagagtcaagaatcttaaagaattgcaaacaatgggaatgattgtgtgtgtgtgtgtgtagtaggcttaggaggatgagagaagttgattaatcagtagagacatacattcaaatagaagaaataagttccaatgttctatggcagagcaggatgactatagttaataagtcaagtgattctcctgcctcagcctcccaagtagctgggattacaggcacacgccactgtgccaagctaaattttgtatttttagtagaaacggggtttcatcatgttggccagagtggtctcaatcttctgacctcgtggatctgcccacctcggcctcccaaagtgctgggattacaggcatgagccaccatatccagcgttttatatttcaaaatagaagagaagacttaaatgttcctagcacatagaaatgataaatgctgactgggcatggtgtctcatgcctgtaatcccagcacttttgggaggctgaggtaggtggatcacttgaggtcaggaattcaaaaccagcctggccaacatggcaaaaccccgtctcttctaaaaatacaaaaattagccagccatagtggcatgcgcctgtaatcccacctactcgggaggctgagacatgagaattgctctaacccagggggtggatgttgcagtgagccaagccaagatcctgccagtgggctccagcctgggcaacagagcaagactccatctcaaaaaacaaacaaacaaaaagataaatactcaaggtggtggatactctaaataccttaacttgatcaatacaattctatgcatgtagcagaataccacattactacataaaaatgtatgaatattggccagctgtggtggctcacgcctgtgatcccagcactttgggaggccgaggtgggcggatcacctgaggtcaggagttcaagaccaacttggccaacatggtgaaaccccatctctactaaaaataaaaaaattaactgggcatcatggtgggcacctgggatctcagctacttgggaggctgaggcaggagaatcgcttgaacacaggaggcggaagttgcagtgagcagggatcatgccattgcactccagcctggagaggagcgaaactctgtctcagaaagtatgaatattatatacagaataaaagaaaattacaagcaagagaagtacacacaaaacaaaccaaaaaacacgtaagaagccacatcataaccaaatgcctcaaaagcagtgacaagtataaaatgccaaaagcagccaatgaatcaaggcacattactttcggaaaaacagatatgaaaattactgcgtacttctaactaatcaaaaaattttcaagccaaatgcagtggaatgacatgtttgaagtgctaaatgaaaacaacaaatttttgtttgcgtgtttgcttttgagacaggatcttgctctatagcccaggctggagtgcagtggtgcaaccatagctcactgcagcttcatagtctcagcctcaagtgatcctcccacattaccctcccaagtagatggaactctacaggtgtgcaccatcatgcctggctaatttttttattttttaaggagacaggggtctcactattttgccagggcttattttgaactcctgggctcatgtactctgtccatctcagcctcccaaagtgcttgtattacaggcatgaaccaccatacccagccattagaatttcttctttttttttttcgtggtgttttttttttttttttgagacggtgtctcactctgtccccaggctggagtgcagtggcgcaatcttgggtcactgcaacctctgcctcgtgggttcaagtgattccccttcctcagcctcccaagtagctgggactacaggtgcatgccaccatgccaatctaagttttgtatttttagtagagacagggtttcaccatgttggccaggatgatctcaatctcctgaccttgtgacccgcccgctgcctcggcctcccaaagtgctgggattataggcatgagccactgcacccggccagaatttcttacagcaagtataaccttcaaaagtgaagagaaaaaaacttccaggcaaataaaaactgagtggattcatcattagcagacatgaactgcaagaaatgttaaggttcttatggcagaaggaatgttacaatagatgaaaagttaccctaaacaaattaacacaaaaagagagaaccaaatactgcatgttcttacttataagtaagagctaaatatctggtactcatggacataaagatggcagcagtacacactagggactgctagatgggggaggtaggagagggacaagggttgaaaactgttgggtactatgctcagtacctgggtgatgagataattcataccccaaacttcagcaacatagttatacccaggtaacagacttgcaagtgtacttccatgaatcaaaaataaaagttgaaaattagccacatgtggtggcacgcacctgtaatcccagctacttgggaggctgaggcagggcaatctcttgaatccaggaggcggaggttgcactgagccaagatcgtgctgctgcactccagcctggtgacagagtgagaccctgtctcaaaaaaaaaaaaaaaaamaaaaaaggctgggcacagtgaactcaagcctgtaatcccagcactttgggaggccgaggcaggcagatcacctgaaagtcagacatttgagaccagcctggccaaaatggtgaaactctgtctctactaaaaatacaaaaattggctaggcgtagtggtgcatgcctataatcccagctatttgagtggctgaggcaggagaatcgcttgaacccaggtggtggaggttgcagtgagctgagctcgcaccattacactccagcctgggcgatagagtgaaactcgcatctcaaataaaataaaataaaagttgaaaaaaaaaaaaacaaaactttgaatccttacaaagaagcgaagcctaccataaatgattaattgtttggaaaatatagtttgtgtgtgtgtgtgtttgtgacagggtctcactctggttgtagtggcatgatcacagcttgctgtagcctcgacttcccttgctcaggtgattctcccacctcagtctcccaagtagctgggactacaggtgtgtgccactatggctggctaacttttgcatttttagtggagatggagtttcttcattttgcccagtctggtcttgaactcctggactcaagcaatctgcatgccttggcctcccaaagtgctgggattataggcatgagccaccacatcccctgcctgagaaatacagaagattctaaaggaactttttttaacaaatagttacagccaactgatcctcaacaaaacaaacaaaaacatgaagtggggaaagaacaccctattcaacaaatagtgctgggagaattggcaagtcacatgtagaagaatgaaactggatcctcgtctctcaccttatacaaaaatcaactcaaagtagatcaaagacttaaatctaagatctgaaactaacaattctagaggataacattggaaaaacccttctagatattggcttaggcaaagacttcatgaccaagaacccaaaagcaaatgcaacaaaaacaaagataaataggtgggacttaaagagcttctgcatgccaaaagtaacaacagagtaaacaggcaacccactgagtgggagaaaatcctcacagtgtatacatcctacaaaggactaatatccagaatctacaacgaactcaaacaaaaagttcaacagtcccatcaaaaagtgggctaaggacatgaatagacaattctcaaaagaatatgcacaagtggcagatggccaacaaacttattaaaaaatgctcaacatcactaatgatcagggaaatgcaaatcaaaatcatgagatcatctcacaccagtcagattagctattattaaaaagtcaaaaaataatggatattggtgcagatgtgatggaaagggaacattcttacaccgctggtgggaatgtaaactagtatgactaatatggacagtgtgaagattcctttaagtagaagtaccatacccagtagtgggatccagcagtctcactactgggtgtctacccagaggaaaagtagtcattatatgaaaaagatacttgcacagtcatgttcaaagcagcacaatttagaattacaaaaatatggaactggcacaaatgctcatcaatcaaggagtggataaagaaattcttacacacacaatggaatactactcagccataaaaaggaatgagttagtggcattcacaacaacctggatgggattggagactgttactctaagtgaagtaactcaggaatgaaaaaccaaacatcgtatgttctctttcataagtgggagctaagctgtgaggatgcaaaggcataagaatcatacagtggactttggggccttgcgggggaaatggtgggtggggattgagtgataaaagactacaaattgggttcagtgtatgctgctcatgtagtgagtgcaccaaaatcccacaaatcaccgctaaagaacttactcatgtatccaaaagctacctgttccccaaaaacctatggaaaaaaaaagttttaagaaagtaattgtttaatgtaaaagtgtgcttctagtttaataacatctaaaattagggtggccacggtggctcatccaaaggcacagaactaatcaattctaagtataattaaattggaaataccatttataattatattaggtaatcagagacaaatactttggaatacatttagcaaaaaattttcaaggcctgtgtagaagcaattataaaacatactatggagagaaaattcaggagtggactgtattgttaagtatagtacaaggcatttggaaaactttttactaaattgtttagttcagatttccacttcacaactttttaaatataaaaaacttctacttttgataccttcagttcaatccttgtaagaaagaaattatttttatttagatttcctcatggagttaagtgggaaaagtaattttttaggttagattattaggttaactccatatttcttggattttgatgcacagatacatgtaatatttacttaccagcacacagatatgtttaatatttagctagtcaaccgggcatggtggctcatgcctgtaatcccagcacttggggaggccaaggtgggcggatcacctgaggtcaggagttagagaccaggctgaccaacatggagaaaccctgtctctactaaaaatacagaaattagctgggcgtggtgatgcatgcctgtaatcccagctactcgggaggctaaggtaggagaatcgcttcaacctgggaggcggaggttgtggtgagccgagatcgtgccattgcactccagcctgggcaacaagagcgaaacttcgtctcacacacacaaaaaaaaaaaaaaaaaaaaaagtttagctactagtcataaatccatgtctggggagaagtattacttactatgaagaattttgtttactttttattttgttaagtaatttattttggcttttgacaggtacataactttatataattgaggttttctcaaaatcagaagaaacaattaagtgaaagcatataataaattaagaataacctaatacattcctaactatgtaccgtgcagcgttgtcatcttaacattttgcctacttattccagaccatttctacttgaaataaaagtgttcttgtacttctttttaatccagctctcctctttctccatcagtaatcactgtctaaatttgttgtttcttactctcatctgcgcttttatactatatgtgtaggcattcataaacaacatgtattcataaatgtgtttcacgtttctgaacctgacatactgtataaattgtatttttttcagaatgatttacttgctttcatgatttcgattatgtattttaacttacatgtggttttcaattatatgattccgtcagaatacatttatccataattctttttaataacttttaggtttcttggtttttctttttagacacaatgttggagtaattgttttttacttttctccatgatgtacacgtgaggattagtacagagtatattttggaaagtggagttactgagtttatttattttgtttgtttattttttgagacagagtctcactctgttgcccaggatggagtgcaatggcgccatctcagctcactgcaacctccacttcttggattcaagtgattctcctgcctcagtctcccgagtagctgggattacagctgcccatcaccacacttagctaatttgtttttttttttttttttaatagagccggggtttcatcattttggcctggctggtctcgaactacagacctcaggtgatctgcctgcctcggccttccaagatgctgggattacaggcatgagccactgcacccggccggaattactgagtttagatcatacccatttactagacattctcatacatctctccagtgtggttttcttcatatattttcccatcacttctttttgaaagttcctattttgtaacatctttatcaacatttagtattttcagtctttgtaattgctgtaaatcccccaaatataaaatcgtatcttaatgtcgggtttatttgtccttctttgatgaccaataaagttaaacatctttttttacatttgttgaccatttaggccttttcttttctcagtgattgttcattatttttccctattgtcaatagaaagttgtatttaaaaaaaaatgatttgtaggatttgtttttatattttagataattacttattggttctatatcacatatatcatttcccagcagctcwtttttccacattagcaagttttagtgaataaaagttttaaattttaggatagtcaatttatcaagttaatttcatatatcttctgaagaatgaaattttttcccatgtagtgtattacgtttctaagcagcacttactaagtaatctgcccatccttcacagtaatctaacaccacctctttaagtagcatcttcttttaatgagtaggactgtttctgattcatttaatctgtaccactgttccaattggttgtcttgcaccaatagaacaatatcttaaatattgtaactttataagtcttgctatctggcaaggcaagcgttcccattttgttgtcttgaagttctatcttagctattcttggcagttttcaagattagcttaatacataaaagaaggaacccctttgagatttttcactggaatggcattgaatttatatattattttagggaaaatgtctgtttactgtaatcatttcgtccatgaatatagtatttatgtctcatttgtttggagtcttgtattatgctgttagatagggtttacgcttttttctataaagtttgcaaattttttgttgattaattcctgtgatctgatagtggttattgctattatgagtaaaatctgcatttggtggtaaatactgatatagagaaatacagctaattattgtgacgtgatcttttgtccagtaggcttgctgaactcttttaaatgttcttatggtttgactataaattatcttttttttgagacgaaatcttgttctgtcgcccaggctggagtgcaatggcgcgatcttggctcacggcagcctccacctctcgggttcaagtgattcttctgcctcagcctcctgagtagctgagattacaggcgtgcgccaccacacccagctaatttttgaatttttagtagagactgggtttcaccatgttggtcaggctggtctcgaactccagacctcgtgatccgctcgccttggcctcccaaagtgctgggattacaggcatgagccactgtgtccggcctgtttacctgatttttgaatcaaaatgtttcaatgtggattggttaccatgtaggtctgttatacagttataaacttgagatcttcctttattatcatcttagaggttgctttattccttttttttttttttttttttttttgagatggagtctcgctcttgttgcttaggctggagtgcagtggtgcgatcttggctcactgcaacctctgcccccccggttcaagcgattcccctgcctcagcctcctgagtacctgggattacaggcgcctgccaccacgcctggttaattttttgcatttttagtagagatggggtttcaccatgttggccaggctggtctcaaactccagacctcaggtgatccaccttccttggcctcccaaagtgctggggttacaggcatgagcccccgtgcccagcgactttattccttatactgtgttaatatttgcttctgttcttagtttactctgtcgttttggtggagtacattctgagtagtttcttgagatatggtgcttgaggttttttgttgttgttgtttggtctttcttgaatggtttgccccgggtgtggaattttagtttggaaattactattctgaagatggaccattgtaaaagtatccaagcctgccattctgccattctgttttctgatcctttgtcactttttctttctaaaagcatatagaatcttctctttttccccaagattctgaaatgttactgtgatatttctttatgtgtgtctatttttatctgttgtgttaggccctttcaatctggcaacttattcttcagccctgggaaattttctttagttgttgtttttttttctttttgatgacagttttccctttctttttttttttttttttgttctcaaatggatgttgtcatttcaattttattttttggctttctagttttctctcctatttctatttctctcattttattcttctttctgggaggtttccttaagtttccttttaagcttccaactgtttttttttttttcctatagcagcttatttttgtttcttagacgaaataactctttttctggtaatacaaatcttggttttgttaatgttttagagtctgtgtaaatctctttttcctacatgttgctcttattcttttgtctctgtctttgttcgtggaccctttaaatttagaggctttccacaaatactaaataatcactggctaggatggatagggtttgtctattttgaactttagttgatggtgatctgggaaccttattttgtgggtcaaactccagtatactagaattttgagatatcatctcctagactggttactttcctcagggaagaaatccatctcctacatagatggtaaggatctgtctgcaagaattctgggtgcagagtcggggaaaatggctgaagttcgttagatattagtatgcatacagtcatttaatttcccaatttttttttttcttttgagatggagtctcactctgtcgtccaggctggagtgcagtggctcaatctcagctcactgcagccttcacctactgggttcaaatgattctgcgtcagtctcctgagtaggtggtattacaggcatctgccaccatgcccagctaatttttttttgtatttttattagtgacaggtttacaccgtgtaggccaggttggtctcgaactcctgacctcaagtgatccgcctgcctcagcttcccgaagtgctgggattacaggtgtgacccaccgtgcccagcctgatttcccagttttggtttggatatgatgatgaagcacagaaatggccttgggttttctctgtattgagaccttctattttaaattctgcagagactaaacttctaaaacagtgaatctccctagtacagagtcatggaggggattgaaggatctattttttttttcttaaatggctgtcactgaaatcctctttgctttttagccctctacttccttagcccccagtgccagtcttacctggtggtaccatttcttatgcctgtttaagattctatggcatacagtgggttggttctcagcttctctgtcaggctggaattcaggtttctatcaaattgccgttgctttttctgtttctacccactttgcccctgtccttatgaggtatttttcttaaagatttctcctgatgtagtttgtagtaggtttcacaaggtactgaaattacatagacgtatatgattcgccatcttaacctggaaacctaaacctacttttaaattgtccgcsttatttttaatatgtgtgatatttatgatgaaacattgaaatatactgaaatrcataatatctagttgttccatatatgtttttaaaataaatgcttcagcaaatctgttaactatttttgtaaatctcagcattcattcttgctttttggaataggagcaagatttttttttttaaagagacagtttaggaaattttagacgaatcctcagaattatttgttgtggacaccaaccactgtaaaaatacctaaatgaaaaaattttgcctttaaatacctcttttgagataaatgtttaagaagtaatatcagaaaaatggtttttaattaaattacttacgttacagtacagttcgagtacaagcatagcaatatccctttcagaaagatctttaaaaaagtaaatgaagttaactccaggacgtttaaccctggtaaataaggagggatatgattgaccagacttaatactggtccttataaacatgttataaatatttttgtttcatatggcagtaaagctacctataaaccttatttatcattgtatttacttgaatatttggaaaatttttgaaaacgtctgttatctcaataatacatcrggtgttattaataggttattgatatgtaacatttttatatttttcctacaggctcagtagtgggaactcttaaaaataaggtcattgtacttatatatttttagtttcgaaatatttagactcttaagataaaatgtgaaataggtaagcctaggtatatatacactttttaaaattaaatttgtttaagtgatgtcacagtcatacaktttttcttttataaatctggtttcatctcacaaccaccttgatcttagacttctagccttcaaaattgtgggttactggagtttgaggctctgtattgatgagaccataggatccaaaaattaatctaaaagtcatgtcaagactttgttggctgggcacggtggctcacgcctgtaattccagtactttgggaggccaagacgggcagatcattcgaggccagtagtttgagaccagcctggctaacatggtaaaactccatctctactaaaaatacaaaaattagcccggtgtggtagcaggcgcctgtagtcccagctacactggaggctgaggcaggagaactgcttgagcctgggaggcggaggttgcagtgagtcgagatcacaccagtgcactccagcctgggcaacagagcaagactcactctgaaaattaaaaaaaaataaaattaaaaaaacgtgataaactaatgactargtctttttcttttctttttttaagagatggggtctctaccgggcacagtagctcacacctttaatcccagtatttaggaggccaaggtgggcagattgcttgtgcccagaagtttgattccagcgtgggcaacaatgtgaaaccccaactctacaaaaaataaaaaaattagtttgcacatgcctatagtcccagctactcagaaggctgaggagggagaatcacttgagcccaggagttcaaggctgcagtgagccgagattgtgccactgcacacagaagaaatatcagaaaaatgatttttaatcaaattacttacgttacaatacagtttgaatacaagtatagcaatatccctttgagaaagatctttcaacacacacacacacacacacacacacacacacacacacacacacacacacacacgccagcatggtggtgcttgcccgtagtcccagctacttgggggctgatgtaggaggatctcttgagcctgggaagtcgaggctgacaaaccttgcctccagagagagagagagagagggtcagaccttgcctccagagagagagagagagagagagagagagagagagagggtcagagcgtcttgccatgtcatccaggctggagtgtagtagtggtacaattagagctcactgcaaccttttttgttttttkttttttttttgaggtggagtcttgctccgtcgccaggctggagtgcagtggtatgatcttggctcactgcagcctctgccttccgggttcaagcgattctcctgcctcagcctcccgagtagctgggactagaggcgcgtgccaccacacccagctaatttgttttatttttagtagagacggggtttcaccatgtgggcgaggatggtctcgatctcctgaccttgtgatccgcccgcctcggcctcccaaagtattgggattacaggtgtgagccaccatgcccagccactcactgcaacttttaactcctgggctcaaggagtcctcccacctcagcctcccgagtcactgggtctacaggcacatggcaccatgcctggtttatattttaaaatacttttttggtagagatggggtcttgctctgctgtctaagtgttctcaaattcctggcttcaagtgatcctcctgcgtcagcctccccaagtactggaattacagatgtgagcccctgtgcctggcctcctagtcaatctttagttggctatttaccaatttgctgtgtgtgtaaatacacacatacatatacatttatatttaagtttcctagactttgcatgtagattaaaagagagtaaaagcaattgccatctgatcttttctgtggccttatttaattgaggttttctacctcaacccagttcccagtgtttttactatacagactattgtcataattattattcttgggacagattctaccaacattaaaagttgatttgcattttagacaaagtaatcttacattttgaattattcctgacaacccaaaaaacaagagtttattaatatgaatgtttaattaaatcccacgtcttttatttctttttgagtccttttccattttgaattttaacagggagctgggtttttttggtgttttttgttttgctttgttttttttaaattcctggctgtgaatcttaagtcctcattctctcagatgtagccagcaatctgggcatggctgtgtctgaaaagtagagacagccttatgcccaaacttctgttaccaacgcgttctgatatccaatatgagttattttgcttgcatttctgataatggctaaggcagtaaccaactataattcatatttaatggttttcaaaagtttgaagtttgagtctttggtcccattttgaggtcataacaatttaagatattttatatagtactaactataagaatactctgatagaaagatactgccaggaatacaaagataagtaaggcaaagtccttgctcagacaggtccattaatactgtaattcaaggtagagtaagattagtgtcattagagtatttgtttctaacatcagttccataacagacactggcttctcagggatatccttactattccttctgaaactattatattgttatcagaaaaactcttagtatgaatttagagtatctggaaatattaatgataaacaagaatcttggttattttttgcttggcaaagataacaagctattattaatggctttctggggcaatgagctattactgtgacagaaataaaaaatatattttttaaacctgtatccaaatagtttgtatgctattgatcttagatgcatgaaatgtctatgtgcttacaaagtgacataacagtacaagaaataacatgatatgaatcacatatgtacgttatacgtgaggttgtcatttagcactgggattgattaaaagcacaagcaggccgggtatggtggatcacgcctgtaatattagtactttgggaagccaaggcgggcagatcacctgaggttaggagttcgagaccagcctggccaacatgaygaaaccctgtctctactaaaaatacaaaaattagctgggtgtggtggcgcgtgcctgtaatcccagctacttgtgaggctgaagcaggggaatcgctggaacctgggagtcaaaggctgcagtgagtcaaggttgcaccactgtactccggcctgggcgacagagcgagactccgtctgaacaacaacaacatcaacaaaaaaggcacaagcagagtctttttcagtaagttagaagaatgcctctcttccctcaatgagtcacaatacatacaagcattttaaagtcaggttaatagttgaaagatcttagatgcaaagagttttaaatcattagttcaagaactagtcagtgagtgattgaataaactttattaaaacatgcttagtgaattagtgaatattacaacacaatttttttcctattactttctttgagtttcragaaagtttctagctgggtgtggtggtgtgtgcctgtagtcccagatactggagaggctgtggtgggaggatcccttgagcccaagagttcgaggttacagtgagctatgataggcaacagagtaagactctgtctcagaaaaagtagtctctatatgtgtatgtaaactttaggaagaagtggatgtttatcactgttggtttgtttctgaagtgtaattattatttgattgtgacttgaatctactttttaagaggccataattttggctaattccaaataagacctgaccttacaaatggcctcattactaagtccagcttgtgctagagctttcactaattactgtctgggtctaggactggtagtcagactgcaacagtcacaacttggtaaacattttaaatactgacataagatttttatattcatacattattcataattgaagtaaaaacatagttccaagatgttgtaaaggtgtctttcactttttcttcagtcttagctgtctgtgaagataaacatacaacttgcctcttataaatggttctcatgcaagataaagctataatgggatactttttttctgtttttcaaatatcagattagcaaagatcaaatgttttgaacacgtttttgaaaagagtgtagaaagactgccactgtcattcattgctggttatgagtatatacagatataaagcttgtggaatgcatttctaattatatatattcatttactcaggcatttttcttctcgtaacttattgtccagtctacatgcatttattcatttgtgggagatgasttgagtacagggcttcttcttgtatgtattagaagactggaaacagcctaactatctgttaaataaactgagtgcagttgctcatgccagtagtcccagctacttgggaggcttaggtgggaggaattgtttgagcccaggagttcgaggctgcagttagccgtgatcccaccactgcactccagcctgggcaacagagcgagaccttgtctcaagggaaaaaaagagtttaataaattattttacatctatccagtggaatacaatgcagccagccatttaaaagaatgaagtagttctgtatgtactcataggaaatggattggtttccacgtcatagtaagtttttttaaagtgtaggacagaacagaattctttagccatttgtttgttttttcttcattgtgaaaatgttttattttatttttaattttacttttaagttctgggatacatatgcagaacgtgccggtttgttacataggtatgtatacacgtgccatggtggtttgctgcgtcatcaaggttttaatccctgcatatgcattaggtatttgtcctaatgctctctctccccttgtcaggccccggacaggccctggtctgtgatgtttccttccctgtgtccttgtgttctcattgttcaactcccacttatgagtgaaaacacgcggtgtttggttttctgttcctgtgttagtttgctgagaatgattagccatttgttttatttgtgaactatatcttaagtgtgcatgtatgtgtgcttgaatatgcataccatatctctggaagaaaacataagaatgcattaaaacttgttgcctgtgtgataaactaggtgtacttcctagagtaaaagggtaattgggatttttcttcatatttttgaatgtttgtacactgtgcatgtgagagagaaagattctcagaggctggatgtggtggttcatgcctgtcatcccagcactttggtaggccaaggtgggaggattgcttggggccaggagttcaagaccagtctggacgatatggcaaaaccccatctctgcaaagaaacaaaaattagccaggcgtgatggtacatgcctatagtcccagctactggggaagctgaagcaggaggatcacttgagcccaggaggcagaggtttcagtgagccaaggtcatgccactgcactgtagcctgggtgacagagcagactctgtcttaaaaaaggttctcatgcattttcttttattgcccttcctgggatatatgcttcagtagcctgagaaaatatgccaaggtcttaacattgaatattcaacatttatagatggttgtctcttaatgaattccttttttttttttttgagacagagtctcaatctgttgcccaagccagagtgcagtggtgtgttcttggctcactgcaacccctttctcccgggttcgagtgattcttgtccctcagcctcccaagtagctgggactacaggtgcatgccacaacatccagctaatttttgtacttttagtagaaacaatgtttcaccatgctggccaggctggtcttgaactctttggcctcatgagatctaccgccttggcctcccaaaatgctgggatttcagaagtgagccaccacgccaggcttcttaatgaatttctgttagccttcaactttaaccctaaaagtaattctctgctgttcacatgatatgaagattcagacaaagaaacagcaaagattttgttcatatagtggagatggttcgaataaaaaaattcttcctgtgatagaacatttttcttttttcaagctcttgaaacaataataccatttcctaaagtagcaaacttagatgatgtgtaaatctcttatttgtatctagacaaacaaagatagcttccctttcttttggtacaaatattttcatctctaatcttattgtgcttttgataaccaggctgacttactatgggaggatagtttgtcactctgaacccagcatacagagcttcatgtgagatagtgtccttgaccttggcctcactagtactgtaatcaggctttcttaccagactgcctgagtgtattaacttgaatatttggttgaacattgtattaactttaatgtaataactgcctagtggagtcagcattcaagtagtgtggttgtttaatgctgtatacttagctgtttttctagaaaacacagatcatcagcagttctaattgtacatactcatcaactcagacattccacttgtaaggaatttatcctacagtcttatttgttggaaataagtataggatcatcatcatcattataagtgacataattcaaagacctgatcatctgtaaaaaaaaaaactgaaaattcaagaagactgggttccttgaaaggctttaactatttcttgcagagatgattttccaaggcaaaatcatctctgaatttcagagatgaatttgaacacaaggatgagggcattcttgtagagtttcttggaattcataggaattaacccagtttgttcatcttcaaatcgtttttatgtttttgccaaagagaagattatcaattaatagtttttttatacaaaaactatgggcagcagtatcaaagttgacattatttgtagggcatttgaaatgtttgttttgctctattatttgtgctattgtttgtgccgtaggtgagctctgttttgttgttaattaaccatttttaaatggtcttgctgagaaactataataagaaatctgggccaggtgcagtggctcatgcctgtaatcccaacactttgggaggctgaggtgggcagatcacttgaggccaggtatttgagaccagccttgccaacatggtgaaacctcatctctacaaaaaaaaaaaaaaatggaaaaattagctgggtgtggtggcataggcctgtaatcccagatgcttgggagtcttgaggggcgagaatcgcttgaacccaggaggtaaaggttgcagtgagccaagattgcaccactgcacttcagcttgggcaacagagcaagactctgtctcaaaaaaagaagaaaaattcagttataatgtttaaggatatttcatatatctttatttctaaacttttcatattatacagtttctacatggtgtttgatatagacttagtaataatgtttattaaatatgtaaattaatgactaaagtgttttttaaagattagaatgaaggccaggcatggtggctcatgcctgtaatcccagcactttgggaggctgaggtgggcggatcacctgaggtcagaagttcaagaccagcctgaccaacatggagaaaccttgtctctactaaaaatacaaaaaagccaggcgtggtggtgggcacctgtattctcagctattcgggaggctgaggcaggagaatcgcttgaacccgggaggtggaggttgcggtgagccgaggttgtaccattgcactccagcctgggcggcaagagcaaaactccgtctaaaaaaaaagattagaatgaatgtggcattctgtcttttactgatgtcgggagaacatcttaaatagatatgttacgggttgaaatgttttccccaaaaagatatattgaaaacctaatacttgtagtatatagtacttgtgaatataaccttaagaaatagggtttttgaagatataatcaaattaagatgaggtcgttagagttgcccttaatctagggttcttataagagagaatatggatacagagatacacagtgtagacaccatgtgtcaacattggcagrgatcggcatgatgcttctgcaagctcaggattgcaaaaggttgccagcagaccaccagaagctaggagaggcaaggaagggctctggtacagttttcagaggagacatggtcctgtttatgtcacagatgtcacttcaccagctggaaattctgtggccagtggcaccagtgcttgagttttgcttattcccactgggctcattctgcctacttggcctggcaggctgaactcggctcacactactggcctggatctcacgcctatcaagggcgagccaggagcagagtggtgaggggtgtgtgaccgggcaagcacagggtccaatcactgtgcacagccaggcatactggctgctatagtggggcaggcagttccagtcaccagcacaggtctggccccattgtgaggctgcagctggatcagatgtaccgtaagcagctgtcgctgcagcacccgcgtgtggatggagggaatgtggtatcatctgaaagcttagaaatgccaggatctgcagagcccccaaaaagggtgttacagcgtgtcacagccctggcttgaggagccctgaggtctgggctcccagtagggccacagctcttctttctttctcgtcacctgcagtgtggcgagtgagggggtgagtttctggagggcagtttcagcccatttgtgttacagctctttcagtcctgccatcccgctccagctggcaactcctgggctggcccggccctgttgctttttcccatcccatggggtggctacctggtggagggcaggagggctgtagtgttacggaagctctggctttgggaaccccaaggtctgggcccccagaaagttcaccactcttcactttcacaatctgggagcatgttaccacccacacctcagtaagccagccaggaatgtgttacagctcctttcagtcctgccatttggtgggtccagagttcttgtcctgcatccaggaagaatgaggttatgtggacaactggagggtgagcaagacagagaggagtgatagaacagctctcagcggagaggagacctgaagtaggtagctcctatctgcagacaggtagtcctgatgagtgtccaagcctggctgagcccggggtttttataggctcagaatggaggaagtgcatgctgactggtccatgggtgggcctggaaaaagcactatccgactggccaaaaggcatcaaggaagttctctgggttggagactctacccagaactggcagcccggcctccaggcttcaggccatccctggcttgtaggattacaggcgtgagccaccgcgcctggtttatttaatgtttttaaataaacacttcgctgtcgacacaactaaactgcatatacttttcaggatcctgggtatgatgatgagaaaagatkccaaaggagatgactggttcctaattttgagaaactttcaaagtggtgaaagaaacacatatggttcaagaagggaataattatatagtaacaggtacttcgaagaaatgtgtaacctgatttatgaaaatcttaaaatgggaacttacgagtaaaatagagatttttgctttaaattaaaaaaaattgtctatcctccacccccttttcttttaagaacttcatactgtcaaccaggagagactatcttttacagctagataactaggcttactagcatgtagaaaatatagctgatctcattatatgcagattctgtaattgcaaatatgcctactcactaaaaattatttgtaacccaaaatggcacttccttgaccattcatagacttacgcagagtggagaaaaatttttgtcacctatacgcacatttccaactgagattgaacaggtgatgttctgctttcttgtttcagatttcatactgtaaacaagtatccttttaatggtctatttaatgtcatgttttttgtattgttctgtttttctggtttaggttagtgattttgctgtttaaaatactccccaaatgtagtgccgagtactgcctaatgttttttaagggcaagaaggctgtgatgatatgccttttgtggaaaatacatgtgttagacaagtttcatttaggcatgagttaatagtgctgctgttcgtgatctcaatattaatgaatcaacaagatagccaggcatggtgtctcatgcctgtaatcccagcactttgggaggctgagacgggtggatcacctgaggtcaggagtttgagaccagcctggccaacatggtgaagacctgtctctactaaaaatacaaaaaattagctgggcgtggtggtgcatgcctgtaatcccagcttgggaggctgaggcaggagaatcatttgaacctgggaggcggaggttgcagtgagccaagattgtgccattgcactccagcctgggcaacaagagtgaaactccatctaagaaaaaaaaaaaaatatatatatacacacacacacacacacacacacacacacacacacacacacacatatacgtgtatatatatatatgtatacacatgtacatgtatatacatacacgtattcatgtatatatatatacatatatatagtgtggttaagcagaaacacacatgaaacatgtttgtggataaatacagttaacaaaaatgtgacaaggggctcattggagcctaccttgtattttccttaagaacagtagctcagtatttactaattcattgtttaaaggggctttacagagcgtaactaccatgcataacaagaatcaattgtacctaccagatttttcttgactaaactgttgaaaaaattttgtctctaacaatttggaaataaattgtacctttttctgtttgaaatgaaacttgctcataaaacaattcaaaatctagttaatgcttcttgagagagacccctttcttgatcagcaggttctctggtgagcctatatagaatcatagcaagaaagcagccaatgaagacagaactcataggcttgaaacactaattgtaatttcttaacattttcagttaatacttatggttgccctcagaattctaaatgcaggctaggcatggtggctcacacctgtgactttgggtggccgagcactttaggaggctgaggcaggagtatcacttcaggccaggagttcagaaccaacctgagtgagaccctgtctctaccaaaaaaaaaaaaaaattagttgggcacagtggcacatgtctgtgttctgagatactcagggaggctaaggcaggaggatcacttgatctgaggagttcacacctgcagtgagactgagccatgatcaagccactgtactccagccccaacgacacggagagatcctcactcaaaacaaaaaatctaaatgctattccttttttttttaactacttcagaaagaatctttatcttctaattgctgttttttaaatttgatgacctaagatggttgtggctcttcttacataatttcctcataaaaaactgtagactggctgcaacaatttagttctacattttcaataatgccttttaaaattaacttcctaggagctggtggaaagtgttttccttaatgaccctcaattttagaacttctttaaaaatatttaatgatagcctttgtttttagatactatggaaaatacaaaaacaaaattgaagaaatctttgtcttcctagaactccaaagttttgtggagacagatacatgcataaataacaagttaaaactatttttactgtgtggtagtagaagtccaaacagatagcagtgggtatataaagcaggaaaggattaattttgagtgatgagatacagaaattaattcatagacaaggctatgtttgaactaggccttggaaagattgaccagggygcagtggctcaggcctgtaatcccagcactttgggaggccaaggcgggcggatcacgaggtcaagagatggagaccatcctggccagcatggtgaaaccccgtgtctaccaaaaatacaaaaattagctgggtgtggcggcacacacctgtagtcccagctactcaggaggccgaggcaggagaatttgcttgaaccctggaggcggaggttacagtgagccgagatgataccactgcacttcagcttggcaacagagtgagactctgtctcaaaaaattaaaaaaaaaaaaaagattgaactgaacagataaagggaaacatcttgagctaaattagacgagaataaatgtaaaagaacagaggacgtttaaggatgtgagatacgcataattacgaaaatgaccatagtgaactatgaatctggaaagcagaaagggttgaattgctgaagagttcatctgcaaggtgaagatgattaggatatcttgcaaaatgtagtaataaagtgctttgaatagggaatgatttagttaaatttgtcttttaggatcagttggaagagttagattaaatgcaagaagggcaattaaattaaaaagaactgaattagtacatgggaaaggtcagaaaaaggacctagatgtgacagtttactgcatatagataatacttagagccataagatgatcagttggagttcaaagtgattggcttaatcttgagccacatccacatttaagggttgtgaagaagtggagccatctgggaagattgaaaaaaaaaaattagagaaatagggaaagcatcagaatatggtattttcaaagtcaaaggagaaataagcctcttataggttatcattaatacgaatgcctctgtgttgaggagggtggaggactgaatttatcaataattgggccattactttgagagaggagtttcaaaggaatgcagaattagacagctagatcacatgtgattataaaagtaggatgacctgaagattttatcttcaggccctattttatgacaatgagtgtgttgattgtgtatttttgataaagaaggaaaaacaaatattacatatttatattttatttgatggacctgagagaatggtagcagtgaatgtaagtggtaagtaaaagaagtaggagaggtctgatcatcagaatatggctaggaaggtagtgatatattcttggaataaaagctctgtgagagcagaaagatttgtttggttctacacactacttatctctaggtatttgttggtttatttgctggcaagaaggatgaatataaaatggagtgaccatggtttatttcagttaaggtttggtggcattgagaccaccaaaccaagaaaaggtcgaggaagtcatttattctttgagactgatgctagaataacaacagtagaagtgattatttctgataatggggattagaatgtgtaatcttcctggggaaaatacttggctaggttggttgtaggcaatggtttgtttgttttgtttgtttgtttattttgagaggaagtctcactctcgcctaggctggagtgcagtggcatgatctcggctcactgcaacctctgcctcctgagttcaagtgattttcctgcctcagcttctcaagtagctgggattacaggcaagcaccaccacgcccagytaagttttgtattttttgtagagaggggtttcaccatgttggccaggctggtctctaactcctgacctcaggcgatccgcccacttcagcctcccaaagtgctgggattacaggcrtgagccaccacacccagccggaagtggttttaaggaagacattaagaatggtaggtgactttatatcatcctgttaataaagagggactatggacgaagtggatttggctttagaatgtttgtaaacattagtatgatgtgatgattgtcctgttttatttttatttttttgagacagagtcttgctctgtcatccagggtggagtgcagtggcgtgatctcggctcrttgcaacctctgcttcccgggttcaagcaattctcccaccccagcctcctgaatagctaggactataggcatgcaacaccacgtgtagctaatttttgtatttttactrgagacggggtttcgccatgttggccacgctggtcttgaactcctggcctcaagcagttgcccaccttggccccccaaagtgttgggatttcaggcatgagccactgcacccagccattttagtaaaattctttaaaacaagcctgtgggagtgaaattaaaatgcagaatagaaatataaatttagggcccagcatagtggctcacatctgtaatcccagcactatgggaagctgaggtgggagaatcacttgagaccaggagttcaagaccagcctaggcaaaaaaaaaaaaaaaaaaatctgtctctacagaaactaaaaaaaattagtcagatatggtggcgtgtgcctatagttcccagctattcaggaggctaaggtgggaggattgcttgagtccaagaggctgataatgtagtgagctgtgatcgtgccatgacactccagcctaggcaacagagtgggaccctgtctcaaatacacacacacatacaacacacacagacatgcacacacacatttctcatgtctatacatagtttattttccatttccagtcaacctcccccacccaaagaaatgaagagacagattaaaataaaagattagttgtaaacccagctttattatagagactaggatagcaaaagcattgcaaaattgtaattccagctgggcacagtggcatatgcttgtagtcccagctactctggaggctgaggcaagagtttgaggccatagtgcactgtgatcatgcctgtgaatagtcactgcactctagcctgggcaacttagcaaagccgtttctttccggtttttttttttttttagatggagtttcactctttttgcccaggctgtagtgcagtggcatgatctcggctcactgcaacctctgcctcgcgggttcaagcgattctcctgcgtcagcctcccaagtagctgggattacagtcgcctgccaccacacctggctaattttttgtatttttagtagagacggggttttacatgttggccaggatggtcttgatctcgtgaccttgtgatccgcccaccttggcctcccaaagtgttgggattacaagcgtgagccacctcgcccagcccttttttttttttttttttttctgagacagactttcactcttttttcccaggctggagtgcaatggcgctatctcagctcactgcaacctctgcctcccgggttcaagcgattctcctgcctcagcctcccaagtagctgggattataggcatgtgccaccatgcctagctaattttttttgtattgttagtagagasagagtttcaccgtgttagccaggctggtcttgaactcctaacctcgtgatccgcccacctcggcctctcaaagtgctgggattagaaatgtgagccactgcgcccagcccaagccctgtttcttaaaaagaaacaaagtagttgtaattgcaatcagatttttcttactaaatatctatgagtgtttggacatgttttgaaacaactaatatacttaatattttttctcaatatytgctatcttaaaaaaataaagatttcatactgattttttttagcttgtcgttactttcttcatgaagaaatttaaatttctacagccagtcctcttcattattgtgacatgaattccaatcctgaatatcatgaacttatagtaatagcaaaattgcaagcattttgctacagtgtgtattttaatctctttccataaataagtacctcagagtaatcatagacattagacataaaaaagtcctattggattattttgtttgtgtcttgccagtgtagcttttccctatattatcgcttcagaagctttttaccatctacttttatttatttatttttgagacagagtcttgctctgtcgcccaggctggagtgcagtggtgcgatcttggctcactgcaacctccgcctcctgggttcaagcgattctcgtgcctcagcctcctgagtagctgggtttacaggcatccgccaccacgcctgactaatttttaatagggacggggtttcaccatgctggccaggctggattcgaactcctgatctcaggtgatccacccgccttaccctcccaaagtgctggaattataggtgtgagccaccgcgcctggccaccatttacttttaaatgtttttcagtgttttcagaagtttcggaaatatacagagttccctagaagtctaatatatgccttttagacctttctttaagattcttttctcagttataaaagtttagaccttcctttaaggtttgtttttttcagttataaaagtttgggttattttgacccaaacttcttttggtgctttccaaaacagtcatgtaatttatatattttcaaagaattgtcctgtttattattgcttatttgatgtaggctgtattgtaatatttgattttgttcacctttcattaatctttcctttaaatttttttaacttctgtgattttcatactcttttattatatatttaaattttataagtaacatgggtacagtcatcttggaatttttgcctgtaatcaggtttttgaataatgaatgacctttctaaaatgccataatttagaagtatttgtggcatctgtgatctaatatttatgtaaaatcttgttatagtatatactactgcactgaaaactgtgttttaaaaaaattatgagattcaaccagtaatccagaaactttaagtaatatggattacaatactgtttattttagcattaaggtatttgtaaattttcttggcgctttatttaacaggatttaacttgtaaatacataaatttaaactacatgcaaacaatcaagtagagcttgtcactattcatgaaaagcaagtcactgctcttgaaactttaatttataagctaaatcactgctgccactgctagaaaaaacaaatactcccaaaggtgtttaagttattttttgctgttttagttgatatttccatccacaaatttacatttttttatttcattcatttcagatcacaagtagtttttatcatgtgcctagcaaaatgaatcattagaaagtaacttaccagtcctctaagagaaaaaatgtttgtttctcttattaaatttgtatacacataaaccaaatgaaagtcttgttacatgactatgaaaagaatgaactgagtagaagtacaatgatttaaatttcactagttctggattttttatagctgaggtgatctttactagtgttgtgtagaaaactaccctaatttaatggtattatccatgtgtactaactggcaaagtctcccagaggccaggcaacgaaaagacccataacccatattaaaatactgggattctagaattattaaatcaatttattgcaagaactaaggatattaaaagaatgagaaagcaaacgtaaagaaagtctttgtaaaagacatgtcggattaagaaaaaagacttaaataaaatatacagattattatcattattattattattattattattattattattattattgtattattattatgagacagtgtcactttgtcgcccaggctggaatgcagtggtgcgatcttggctcactgcaacctctgcctcccgggttcaagcaattcttatgcctcagcctcccaagtagctgggattacaggcatgtgccaccatgtccagttaattttttatttttagtagagatggggttttgccatgttggccaggctggtctcaaacaccttggcctcccaaagtgctgggattacgggtgtgagccactgtattcagcccttgaaatataccaattcttaaaactcaacaataagagcatgaacaacctgacgtaaaaatgggcaaaagacatgaacagattagaccataagatacagcagtcattccttggtgtttacccaaatgagttgaaaacacatctaccccaaaacctaaacatggatttttttataggagctttattcataattgctaaaacttggaagcatcaaagatgtccttcagtatgtgaatatgtaaataagctgtggtacattcagacattgaaatattacccactgctaaaaagaaatgtgctattaagctatgaaaagacatggagaaaaatgcattttactaagtgagagaagccaatctgaaaaggctacatagtatatgattccaagtacagttgactcttgaacaatacaggtttgaactgcatagatctacttatacagggattttttttcagtacatacagttggccctctgtgtctgtgggttctgcctctgcaatgaaacatggatagaaaattcagtattagcctgggcaacaaaatgagaacctgtctctacaaaaaatttaaaaatttagctgggcgcagtggctcacacctgtaatcgcagctctttgggaggctgaggctggtggatcacgaggtcaggagattgaggccagcctggtcaacatggcaaaactccgtctctactgaaaacacaaaaattagccaggtgtggtacaggtgtctgtaatcccagctacttgagaggccgaggcaggagaatcacttgaacccagaagtggaggttgcaaggagccaagaccgtaccattgcactccagcttgcgcaacagagcgagactctgtctcaaaaaaaaaagaaaaagaaaatctaatcttttaaggggaaaagaacacatatttataaatatttgcaaataattacagggtattctaagactccttaaatgctttctaagaaaactcaggatgagatcctctgctctagaataagatatatgaaatttttcgtgtatattaaagtataatgaaggttttagactaaacatttctatttcttttagccattcataacataacgattctagatagaccttcactatccgtatcacttggctttattttcttatgtttctaatgtctttgttttgtttgtttgttttctaatgtttctaatgtctttctgaatggtatgtctttaattttcatttcaaatgatatcaatgtattgagactggtacttcacatacgtggaacgacagctttaaccttcataccacagaacagtgttgtctcctactgagtttctgtttagcttcatctttgcatcacccaaaatctctgagacartgcttaatacactttaaatgttccaatgaatatttgttgaatgaataaaacttcctaatccttttttgcatcaaaagctgccaagctggttttaccacatattatactaatatgtacctgtgggcgtggggtttgtatgtattgcaacatacttagcctcttaagtagatggaaccacaggtgtgcgccaccatgcccagctaatttttgtaatttttgtagagacaagatctccctatgttgccagggctgataaattttttgttgaatgattaactttacttctggtttctcgtgtcttcttttgaggcactttttctttgttcctcttagtatgcatagaaagttgagatcaacwatgattgaatcttcatcttttttaagcatcaagaagaaactacttttgaggttattctgtttactatttttacttacgttctgtttctgtgtattctggggaggcagcattaccactttcccagggtgctgatttagctgcttgatatttttaggaagccagaatacctttaaataaatatcttctgcaaaataccaaagagcttattctcttactagccctagatttttcgtatttgaaaacctggtgygtataattgggtaaagtttaaagggcctctatgtggttcaaagagctrcatactgaggatgggcagctttccaatgtaagctcttggtaaattatttaaaggtcctgtggttcctgagaaagtaggatgttgagtgagcaaagtgaccaggaaactgatctgttaagaaaaggtctaagttctggactgaggtgctctgctctgagatatattcactctaggccaggtgttcttaaccgtgttcacggtcgcaatggctgaagcaacggttcctaaaggtgattgaacctcagaactaacccagagagcttttwaaacctaaggattcctgggacccaccctcagtgtaagttacagagtaaggcttagatatgtgtattcttagaatgttctccaggtgatcttgaaaattctgaaattgtggagcaaaatagtgtgtgtctcatgtttcttttggagctacagctttcgtcagattcttaaaagggtctttgattcgaaaatcaaaatgttaagaacagttgctagaagccactaattctcaaacttgatagtgtatcagaatgacctaagaatttgttaaagcacagattgctggaccccacttctagaatttctgattcagtaaatctggtttggagcacaggaatatgcattgttaattacaacaggtccttgaatgatgtcattttgttatttcattgatgataaaaagtattgattcctagctggggctgctctcaagcaaatgggcttgctgtccagtgtgcacagaaaaccaataactatggcattggctttttagaaaagaaaggtttttttgttttgtttgttcgtttgtttgtttctgagacagggtcccacagtgttgcccagtctcgagtgcagtggtgtgatcatagctcactgcagcctcaaactcctgggctcaggtgattctcccaactcagcctcctgagtagctgggactagaggcacacaccaccacacccagctaatttttatattttttgtagaaatgggatctccccaggttgcccaggctggtcttgaacttctgggctcaagtgattgcttcccaaagtgctgggattggaggcttcagccactctgcccgggcagtaaagaaaggcttatggcaaaactggctaggaaggagacaagagtcagactcaaatctttctgatttgggatctgcggcaagtttatggactcagagggcaagggaagggatttagaaatgttggcttagcagggtctgattggagggcttcaaattttgccatttacggtaagttatgttgaggccaattttagccctgtatcttttccggccaatggacccctcacttccaaaagaggttctgacattcaggttctgctcctgtcccagtctgggttctgaggagaggaattattggttccaggtgttgttaagtcattaatgctttttctgtcgtgcgtgctacatgacttgcagtttggggctccattatacctatgagataactcgacattttgttatcaatggtgtaggcccagtttggtcacaaactggttgtgacagtggtgcttgtagggtcactgtccgtgaggagtttgcactttatttccatgtctgcgtgggtttgctcaggatatcctggtttcctcccaaatcccaaagatgtgcaagctaatttaatttgcttgtgtaaattgtgtgtgtatgtgtggcgtgtatgtgtgagagacagcgagtagagagaatgtgtgtgtgtgtgtgtgtgtgtgtgtgtgtgtgtgtgtgtgtgtgtgtgaatcttccctgccagggaatggcatcttgtgcacgattggttctggccttgaatggtgagcttctaggataagctctggccactcacaactctgaactgtaataattgggtaaataattagcttgtttttattaatctttcttaaatgtatgtatagcttacatttatttcaatgttaaatattgaatgtgctttgagtccttatttcgaagtttaatgatgtttttgtcaccagaaacatgccataggaacttaactcttgtttatatcagactgtggttttggtttcattataagttattcccaagaacctatggatgaagttaatgaagggttggtgtttctgcagatgctgctggttgagggttatcctttgagaaccactggttctaggccttggttaacaccactctcagccttcagcatcaggctttcaggattcttcagaatgaatgacagtaataaacataatgaagcataacaaagctcaatctaattcaccactgtaaaagaaggataaaggaaactccaggtcaggtgtgggtggctcactcctgtaatcccagcactttggtaagatgaggtggatggttcacttgaggtcaggagttctagaccagcctgctcaacatggtgaaaccccatatctactaaaaatacaaaaaattagccaggcgtgttggtgcgcgcctgtatccccgttactcaggaggctgaggcaagagaatagcttgaacctaggaggcagaggttgcagtgagccaagattgcgccactgcactccaacctgagtgacagagcgagactccgtcccccctcccaaaaaacaaaaaaaaaaagaagaaaagaaaacagaaaattctctttttcctagcaaagtacacagacattttaagttgactcttgacaaacctagttcatgaacaattgcttctctatgtagcattttgcttttcttattgtcagagtagaaaaatgcatatttccatgactactttaaatggtttttttttgttttttacactgaattatgtaactttttaagtatacccacatttttccaaggccaagtagaatacagcacaaagttaaaacaaaatattgtttaacctaaatgtgacaggaagcaggaagaatgattctgagaattcctgaaatgaagaagaatggttctattaaaaagctcagaaaggccaggtgcagtggctcacgcctgtaatcccagcccttcgggaggccgaggtgggtgcatcacttgaggtcaggagtcaagaccagcctgaccaacatggtgaaaccccatctctactgaaaataaaaaaaattagctgggtgtggtggcgggcgcctgtaatcccagctacttgggaggctgaggcaggagaatcgttcaaacctgggaagcggaggtcacagtgagccaagatcatgccattgcactccagcctgggtaacagggcaagacttggtctcaaaaaaaaaaaaaaaaaggctcagaaagcaggtggtcaggttgctaatacagggaagctttcagatccccaaagaaaaggcaattgttaccaaagctataaaacactgctacaaagaagtttatttgctcagactgcttataggctatctgaaactttgtaggaaactgcaactctggaagaaatctttattatttatgaagagtctatgaaattttcctgtctccacagggatgaacttgtaaggcttttggacatcattagtgggccttaacttttttctttcccagttagatctgggactcttgtcttattcctttagagggacaggacttcagtgaaactgacctgaattaagaaaacctagagggctgggcgctgtggctcacatctgtaatcccagcaactttgggaggcccaggcaggcagatcacaaggtcaggagaccgaggccatcttggctaacacggtaaaaccctgtctctactaaaaatacaaagaattagtcaggcgtggtggcacgcgcctgtagtcccagctacttgggaggctgaggcaggagaatcacttgaacccgggaggcggcggttgcagtgagccgagatcgcgccactgcactccagcctgggcgatagagcaagactctgtctcaaaaaaagaaaacctagagttttagtggggaaggtcttttaaagaagaaatgttatcgaaattttattgacctgagaggagattagtatatttgttttccctgtacattttaaaaatataactttgttaccccttaacatgctagaaagggaagaacttttaaatgaatcgtaatttgtaattgaaagaaaacacttcagtgccaatctttaattgtgtgaaaaaggtctctctttcagtatagtctttctgtgttgcatatcagtactttgatatttcactgctgtcaaaatatcggcataagttaccaatacttaaagaaatatggtagaaacttggattactttgttattactttaccatgttttgaatctaaatactacttaacataggtgatcattgtcacctaaatgttaatcttctaaatatgcaaaaatagatactgcatcgtatcatatacttaatggaaattgtgtatctcatttgtccattgaaaaatttggcttccagattgttgctgacatcatcagttttaacaaacaaggaggtaatggggaaataattgtagagccttgttgacttatactgcacaagaaacagatgtttgccagatggaaatgaacaaaaccagtgcaaaaaargtgtcttattcaagtttctaagaggacaaacaatgaaacgattaggaaaaactggaagaggcatattactagcttttgaccaaaaaaggtcaggaaatcagtcatatgcaaacgtatatgtcctactccttgaggatggtgtgcttgacaggactcaagattgaggacattttattttaggttaacctcagtttctcctgtgatttttatgagtattaacattttaacacaagcattgcttttatggttgagttgatttaatggtataatatttcttattcccacagaattatatttaatttttatcctcaagaggtaaaggattggctgggcatggtggctcatgcctgtaatcccagcactttggaaggccgaggtggtagatcacgaggtcaggagatcgagaccatcctggctaacatggtgaaactccatgtctactaaaaatacaaaaagttagccaagtgtggtggcatgcacctattgtccatgctactctggaggctgaggcaggataaccgcttgaacccgggaggcagaggtcgcagtgagccgagatcataccactacactccagcctgggccacagagtgagactccgtctcaaaaaaaaaaaaaaaaaaaaaaaaaaaaaaggccaagcgcagtggctcacgcctgtaatcatagcactttgggaggccgagacgggcagatcacaaggtcaggagttcaaaaccagtctggccgacatggtgaaaccccatctctactaaaaaaacaaaaaacaaacaaaaaaaaamccagaaaaattagccgggcatggtggcgtgtgcctgtaatctcagctactagggaggctgaggcgggagaattgcttgaacctgggaagcagaggttgcagtgagccgagatcgtgccactgcacttcagcgtgggcgacagagcgagcgagactccatctcaaaaaaaaaaaaaaaaaggccgggtgtggtggctcacgcctgtaatcccagcactttggaaggtggaggcggtgaatcacgaggtcaggagatcaagaccatgctggctaacacggtgaaatcccatcgcaccactgcactccatcctgggcgacacagcaagactccgtctcaaaaaaaaaaaaagaaaaagaggtaaaggatcccatggatcccatgccacacaagcatcttgtgtcgttttatttctgtcaagcgggacagcctacttggtttactttatgaagtttaaaatgggagatgttactttttacctttaattctgccagttcatgtgaataatacatgaaacattcaggagtacttattttatgcttctttatatatacacaagtggtagcagtgtttatgaagagtttggtttatcacatttatctgtactttgctcttaaacactaagtagattgaacaagataatattaaaatcttagaattgaaaagaatctttaatattttataaaccatccccaggcagaggcagaaatatattccttatagtgacgacttgacaaattttcattcagaatcttttttttttgaaatggagtttcactcttgtcgcccaggctggagtgcagtgatgccatctcgccccactgcaacctccgcttcctgggttcaagctattctcctgcctcagcctcccgagtaactgggactacaggtgcgttccaccacacccagctaatttttttgtatttttagtagataccgggtttcaccatgttggccaggatggtctcaatctcttgaccttgtgatccgtccaccgcagtctcccagagtgctgggattacaggcgtgagcaaccgcgtgtggcctacactaactttttaaataatcgtacatatttattatttgcccctcttctcttccccaggcaaaacatttagcattccttcaaatgatcttattattctgtaatttttttttaaattgatatgaagtctcgccctgtcacccagacttgagtgcagtggcatgacctcggctcactgcaacctctgcctcccgggttcaagtgattctcctgtctcagcctcctgagtagctgggactacaggtgtgtgccaccacactccaggtagtttttgtatttttagtagagacagggtttcaccatgttggccaggctggtcttgagctcctgacctgaggtgatcacccacttcggcctcccaaagtgctgggaaaacaggcgtgagccaccgtgtccagcctattcaagttttgattccccccactcccatttaaaaatgtatatgtaatatgtattggtttagtgtcttcaaacccttcaggattctttcacataaattaattaattaatttagaggcagggtcttgctttgtcatctagactgtagtacagtggcacaaacatggctcactacagtcttaacttcgtgggctcaagtgctcctcctttgtagctgggactacagccacatgccaccatgcccagctaatttaaaaatttttttttgttgtagagatggtctcactgtctcaaagcaatcctcccacctttgcctccctaccaaagtgctgagattatggtgtgagcccctggcccttggcctctttcacatgcatttcaaggaagctagtgcttctgtacattctacttgagtagtttgagtttttaaacctaaatgtaggtaaattttttcattattaaaatttaaggttaatccttattttagctttttaaaattttttttctgtttcaatggatacaattccagattttcttgatcattttaaaatctaggtcatgattgtttttatcataagacatatttttaaatcactatgtaatttgttttgtttgtttcgagaccacgtttttgctcttttgcccaggctggagtgcaatggcaccgtcttagctcactgcaacctctgcctcgtgggttcaagcgattctcctgcctcagcctcctgagtagctgggattacaggcgcccgccaacacaccggagaattttttgtatttttagtagagatgaggtttcaccatgttggccaggctagtctaaaactcttgacctcaggtgatccagctgcctcggcctcccaaagtgttgggattacaggcgtgagctaccgtgcgtagccagccattctgtcatttgttaatttgaaaatagagatagctttcaagcgataatgagtatataagaccagaaatgaatgaataacatatcacaggttaataacagtactattttttttttttttttttgagatgggagttttgctcttgttgtccaggctggagtgcaatggcacaatatcagctcaccgcaacctctgcctcctgggttccagcgattctcctgcctcagcttcccaagtagctgggattacaggcatgtgtcaccatgcctgactaattttgtatttttagtagagacaggatttctccatgttggtcaggctggtcttgaactcccgacttcggcctcctaaaggtgctgggatcacacgctcggcaacagtactactaatcagtactcttttttttgtttgtttgtttgtttgcttgcttttgatttttttggagatggagtctcgtctgtcgcccaggccagagtgcagtggcgtaatctcagctcactgcagcctttgcctcctgggttcaagcgattcctgcctcagcctcccaagtagctgggactacaggcatgcgctaccacacccggctaattttattattattattattattattattattattctcttttaattgttgtatttttagtagagacagggttttaccatgttggtaaggctggtctcaaactcccaacctgaagtgatctgcctacctcaacttcccaaagtgctgggattacagctgtgagccactgtgcctggcctattaatcagtactctttaacccactgcagatatgtaattatcatccagcctgtatttcattgacttacctattgtaggttgtcttgataaaagttttgtttaagtcaagttccttaaagcttagtttcaaatcttattaacctaataacttttgtttttattaaaatgcaggctgggtacagtggctaatgcctgtaatcccagcactttgggaggtcgaggtgggcagataacctgaggtagttggagaccagcctggccaacatggcgaaaccccatctctactaaaaatagaaaagttagacaggcgtggtggcgcacacctgtaatcccagctactcgggaggctgaggcaggagaatcttttgaaccaagaggcagaggtttcagtgagccaagatcacaagattgcactccagcctgggagacagagcaagactctgtctcaaaaaaaaaaaaaaaaaaaaaaraaatgcaaattactctcaatgaatatattttgctcttacttggtcaatttgttttttaaaaattttcattatactgattatccattgttggctcaagataccccacccaaaatattctggtaagagaccagaatataccatccccaaaatatctttttttgccatgttttgagctagttmttctgagaatctgcagacacaggagtaattttgaaaagctgcccttttgtaaaagaaatttacccatctataaaggagatctactttagtaaaagttacctgtatcagggaaagggctgctgcagacaactgttattacctgagagactttagtctgcataacaagactatctttattcatcatgtatttcctcctctcactccattttgtataacttgtgtagacaccaacccttaaaagccccaagcttctgggagtctcggtggctcaggccggttgccctggcactcggggaggcgaggctacacattcgaggccaacctggtcaacattgattaaaaaaaataaaaaaatagagattactattttggccaggcacggtggctcatgcctgtaatcccagcactttgagaggccgaggcgggcggatcacgaggtcaggagatcgagaccatcctggctaacacggtgaaaccctgtctctactaaaaatacaaaaacttagctgggcgtggtggtgggtgcccgtagtcccagctactcgggaggctgaggcaggagaatggcatgaacccgggaggcagagttcatgagccgagatcttgccactgcactccagcctgggcgacagagcgagactctctctcaaaaaaaaaaaaaaaaaagccccaagcttctattccttccatagcttcagatgctgtataagcttcaatatctcactcttcagtgagtctcatattttgtgggactactgttaattacatacgtaattaaaattggtttcctggtagggtgccatggctcaagtctgtaatcccagcactgggaggttgaggagggtggatcacctgaggtcaggagaccaccctggccaatatggcgaatccctgtccctactaaaaatacaaagattagctggggcgtagtggtggtgggcacctgtaatccccatgcctgcctcagcctcctgagtagctgggatcacaggcacctgccaccatgtccagctgatttttgtatttttagtagagttggggtttcaccatgttggccaggctggtcttttttttttttttttttgagacggaatctcactctgtctcccaggctggagtgcagtggcggggtctcggctcactggaagttccgcctcccaggttcacgccattctcctgcttcagcctccggagtagctgggactacaggcacccgccaccccgcccagctaactttttgtatttttagtagagacggggtttcaccgttttagccaggatggtctcgatctcctgaccttgtgatctgcccgcctcggcctcccaaagtgctgggattacaggtatgagccaccgtgcccggcctcaactgcctatctctaatgtcttggcaatgccatgatttttttcaaagactaccagttaatggctctgagcttgtacctaccaatttagtattctaacatataatttaatctatgatttttaattactaaaagcatgaagacgttcatagtattgtttataatacaaaattgcaagcagctttagcattcaacattaagagaatgaataataaaactaatgctttaataaactcatgcctgttttttaagtcgttaaaatgatggcaatgtaagaacatgagaagattattaaataaaatgagcaacttaaaatttgcgtgtatcctgaatgttgataactaatatggttgtgaggaaaaaaagggctgaaagtgcacttaaatagttaactggctgggttcactaaggataagaatatgggatctttttcatgcatttattttacaaattttctcaaatataattatgttacttgttaagaaaactatttttggaaacaaaaaggatcctctacatatcatttaatctttagttttttttaatctctagttcatattttccatagtaaaatcactttttcttgacagaaataaaagtaattaaataagcttttctttcttccaaatattggtgttttatcatctttcccaatggtctttttctgaacatagctttaaaaaccctttatgttgaattgatttttcctcctaatcctgcttatttctcctttgtgaaaggtgacgtatgtcagtaaagcaaattaaaaatacataaacttatgtcatacttcttttcctttgtactttgtgactttgcagtttcttctagacaggcttcatttttctccattcagcgttcaaagtttaaagtttaattcagcagatggcaaaacactttgctctctgccacccatgccaaccagcatgaaaataaatacaatgctttcacaccatcttatgatgtaaaaatcattcagctgtgaattaggaaatccaagttctggtcctagcacttctataaacaagatttttgacaaacaaagtcacttagactcgagtgtccatttttttatctgtaaaaatgagagtatttctaacattaaagtaataggactaaattttgtatttcttttttaaaaatacctatatttttagagacrgcatcttgcaatgttgcccaggctggtctyctactccctgggctcaagccatcctctcagctcactttctaagtagctgggattccaggggcatgccactatgtctgcttgtatgattgctgcttgatttgtatgattactgtattccgttctcttataaaagactgaatactctgctagggtaaaaatttggttgtcttttcctcactattgcataccctggcccaaagcatggtgccttgcacatagaagccattttatacctattgattgaatgaatgtgctacaatgtttgctggagataggagagttaaaaaagtcttaaggtccatatctactagaaatccttgtagaaatcatagactattgaaggtttgaaactgtgatacacaagttttgcattgcttagaagatctgcatggagttattaatgttaaaaacttttttgtttttttttttgagactgagtctcgctctgtcacccagactggagtgcagtggcacaatctcagctccctgcaacctctggctcctgggctgaagcgatcctcccacctcagcctcctgagtagctgggaccacaggtgcgtgccaccacacctggctatttttatttattctttgtagagacagggtttcaccatgttgcccaggctgatctaaactcgtgggctcaagtgatccacctgcctccgcctcccagagtgctgggattacaggcgtgaaccactgcgtatgacctactgttaaaaacttaatcctttggacattacaatgatgtaggagttacatttttatgtattttcatagattttacagtatggcttattgaaaaatactttaatgaattatagtcagctttcttgtaaggccagtcaagttgaattcctcctacgattgttgttcatctttttttccacccatatgtctttaaaaatatttatattgctagatcattgaacttgtcagagttttttgcttttttgtttttgagtctgtataattttttaaaatccagtggtttgtttaggcttccacgtgtataaagatgagagatgtattcttttcatggcccaagataaatggaaccaaaatctttgtttattttaactcctaaaattgtacatataagattctcacattactggaaggagcagattttctttgggtaggcaggcagtgttgccttccttttagcctctgtttaccttctgacctgtgttgatacattcagcttgtaacctagaaaccaactaaaaaggaaggaagttagagatgtgtatttctgggcagtaactggagtagtttcctcttcccctagcctggtttagcagccaaaaaaggccttttactcccctcctcacctcccaacaaaaagaaacaaaaattaacttttcacctttttacctcagtctagtaaagaaggtataagccataagaacaatcaatttaaaggactaaattgtgtgaaaggtgggatctaccattctctaatgagttataagaacaggagtgcattaaggagacttgaagtaaaagctagcaatttatgcttgataccaagtgggttctctatgtcattacttcattatttttgtttgtgttaaaaatttaccagagtaccagaccaattaataccagaccagtcacattaatatatttatattagccagatgtggtggcacttacttgtagtcccagctgctcaggagactgaggcaggaggatggcttgagcccaggagtttgaggctgcagtgagctgatagctccactgcactctggcctggacaacagagtgagacccaatctctaaatatatgtatgtcaagcccattttaaatatttaaaaggcattcattattaccaactagttgtaactctgcatcctttgcatcaagaattgattctatagtatttttagtagtggagaagccagtcttattttaattcaaccatgatgtagtgtgaaatactttttaaaaatgaatgtttggtttttcagtattgttaattacattaattttactaaaaattagtacatttgtgttactaagaatgtatgacttttgaggcaattgtatggtttagctaagtgtactttgtgctatatgattctgtaagggactgaagtacttgagaagcaaaaatagctgtttttaagtctatatcatatagtgtagacaaacttgagtttatgcaagattatgagataaatcctgtgaaattttctaatgtacaataaattggggaaatgtactaaagtacttaaaatttgatagtttgttatattaagctgtattaagcatttgctttttttggtttggtaacatgacattgtgagttcttttatttacatagattctttttattttatgtctgattaattatgaatgaattattagggtggttatatgcgatttaatatccacttgacaacattattaaaaacacttcgttctaaagttaccttggctgggagcagtggctcatgcctgtaatcccagcaactttgggaggccgaggcgggtggatcacctgaggtcaggagtttgagaccagcctggtcagcatggtgaaaccctgtctctactaaaaacacaaaattagctgggcgtggtggcgtgcacctgtaatcccagctacttgggaggctgaggcaggagaattgcttgaacccaggaggcagaggttgcagtgagccgagattgtgccattgcactccagcctgggcaaaaaagagcaaaactccatctcaaaaaaataaagttaccttctggatcatgcatgttctacacaatatgttctgtaaaataaagccatactttactcacagtcttaggctaatcattgcccatctctttttcattctttttataagtgcaagttcatcatatactaaattgaaaatatcttttcggtagtttttcttggttctttttttttttttttgagacagagtcttgctctgtcacccaggccagagtgcagtggtatgatctcggctcactgcagcctccatctcccaggttcaaacaattctcctgcctcagcctccagagtagctgagactacaggtacgccaccatgccctggctaatttttgtatttttagtacaaacggggtttgccatgatggccaggctggtctcaaactcttgacctcaagtgatccacccaccactgatcccggcctcttttcagtagctaacctgataatttctgtgaaatgaaattgatacttctggagtagatttaaagggattatgtatgtggtatttaaaaaacatcagtatgaatacaaaattagccaagtgttgtggtgcatgcatgtaatcccagctatacaggaggctgaggcaggagaatcgcttgaacccaggaggcagtggttgcagtgaggcaagatcacaccattgcactccagcctgagcaacatgagcgaaactctatctcaaaaaaattttttttaattagcatgaatttttagatttactgaaattgagatttctccatagggatacatttataataaaagactatttacatccgggcatggtggctcacgcctgtaatcccagcactttgagaggctgagatcggtggatcatttgaggccagggatccgaaaccagcctggtcaacatgatgacacccctgtctctactgaaaatacaaaaattagccgggcacggtggcgcgtgtctatagtcccagctactctggaggctgaggcaggagaattgcttgaatccccacgggggcagaggttgcagcgagctgagatcatgccactgtactccagcctgggcaacagtgagattctgtctcagaaaaaaaaagaaaagaaaaaaaagactatttacatacatctttttaaaataaattaaatatttcttgcacctacaagtgtatttttaaagtttcagtgcatgttaccatatataattcctctttcatcatgtaatttctacaataaaactgaaaccatttcaattaaattgtaatacagaagcgtggttgacttaagtatatggccagctttcctgctctaagtcagaaacttacaaattttcgctggatgctctaaaggttaaaatttaattatactgacaaattaatagacataacctgatgttttacatagagccacaaatttatattccattccatctctgctctttgatttattgagtagccaaagtcagtctcatatcatcacgtaagtctccactatgaaacgagaaattactataaggcctgtcagggtgactcatgcctgaaatcccagcactttaggaaactgaagtgggtggatcgcttaagttcaggagttccagaccattctggacaacatggtgaaaccctgtctctacaaaaaatacaaagagttagctaggcatggtgatgcccacctgtagtcccatctacatggcaggctgaggtcggaggatcgctcgagcccaggagccagagattgcagtgagccaagatcgcgccactgcactctagcctgggcaacagagcaaaatcctgtctcaaaaaaaaaaagaagaggctggacacagtggctcacacctgtaatcccagtactttgggaggccgaggcgggtggatagcctgaggtcaggagtttttgagacaagcctggccaatgtggtgagaccctgtctctactaaaaatacaaaaattagctgggcttggtggtgcgtccctgtaatgccagctacttgggaggctgagggaggagaatcgcttgaacccaggaggcagaggttgcagtgagttgagatcatgccactgcgctccagcctgggtaacagagcaagactacgtcctccaaaaaatagagagagaacttactattagagcattcttgtccagtagaaataaaatgtgagctacatgtgtgattttaaattgtctttacatcaaaattttaacataggtgtattaattttacagtattttatttaacccaatatgtcaaaatattagcatatcaaaataaaattattcatgagatacctcttaattttttttatattcaatgtgtattttgtacatcacacatctcaattcagattaactacatttcaggtgctcagttgctacatatgattagtaactaccatattggacaacatcagacagcagaactctagaatttagatagatgttaagagactatattatataacacatctgagaaatgcattttatgctttcaaattgtatcttagaactatctaggttaagttgttttttgtaatgagtgaaaatggttgaggaatattttcaaatctaccaaaataaatattaccagtttttttttagtaaaatgcctatgagattgttgagatcattgtctaaaaatattttaaattgatttattttgaagtttttaatatttttaaggcaaaatggttatactaataaataaatcgtgcccaaaaacatacaaagtatatttgatgctttatttttaccaacttgagagatagtcacatgttatttcttttctgcactttctcaccttggtaaatctggaaagcaaaaacttagtatttgcatttgctttatgaaggagacagtaaacttgagctttcagtctcgccactagtctgtctttgtctgttgttaaaattatgagccagtctctatggccgcagccaaatgagtaatcactagtaatgtgactcgtgctggaagtgactccatcagcacctgtgacgggggattagttacagtttacagagcaccgcctcttcccttctctcagtgtgccctaagccaagtactcgttctcatttgggtgtctgcactgttggaagctactgcactgtgtttccacgcagacagagtacagtgggaaaggctttctccagctgatggatggctgttctctttatttggagtatcttactggttatgtaagcgacctcgagagaaattatcctgacccagatcggaggatgcagtagtgcttcagctgcaggatttcttagtcgttaacaccacagtgctgatgacaaagagcgagttgtaatcctcatcactgccagggctgagccagagcagacagaaaatcgtcatttgctcgttggagacttgttaggttacagctcctgcttcgttctgtggtcttggcttttcttyctatacaatgacgccgctgcaagtgagctcagaaatgcttggtttgagagccatttgcctgtgatttttgaagactaaagaagtatttacactagatactcttccagaacaaaatagaaatttcagcaaatacttactgacctttaaagccttgttgtggatttctgagatttaaagatactttaaaattctcaagaacaaagtacggtttgtatttttctgcttcctttttcttttgtcttaatttacatttggtttttcttctcagcctgagaaattaaggtcactgccttttataaaagatctggcctcaatgtttttagttttaagaatttttaactttcatttgtttaaaaaggtttattgtrtttgtagtaatttaataactgtaaatgttaaaaaacgagtttaattgtttaaagtattatggcagaagtgcttcaaattaggattttcagactagtgtttcaaggaaagtgggggtatttgttttgtaaggtttttttttggttattcccttccccacccccaacttgttttctaacagtatcgtgtttttcaatagacctgcttgggtgggaatttggactttgttctttcaagtcactccagtccttttttttttttttttggtagactaaatcttaacttctaaaatgttgcttaggttgttttctgctttagtatttacctttggtgagatttatattagtatttttgcagttaataagcctgttttttttttttaacttggaattgttaactgttaaccggagattgttagaaactaagactgcagacataagctccttgaatttcctgttaaatgtgaaatggtgagctttaacatcgtttgtttgagcagctgagttgtgtttaagagctgtagctgatttattttaaaaatgtttttcggggagggctcatctgttcgcgtcttcctcatgtgaatggaatgtggtgcagcatggagccccaaacaggatacagttgttctaagcattcttcctatagwtyggtaggccctactagaaatgcaggctctcaactatatttattttggccgtagactatttttaaaaagtatgtttaacactgataaatgaccttaaaaaaaactctcactctaataaaattgaaaaagcattttgtttcaactgaacatttagtgttagtaattttcattttggttttcaaaggctttttagagcatttgaatgatagtcttttgtgattagggccatattctactgtgactttcatcagatgttagctcattgcttccctttaggctgtggaagttactcatagaatgatatatctttagagtgttgaattagttatgcatgagttctagtttctttacattccagtgcacctagacccatgaactatttactacaaatttcatcataccagctgtaggacccatttgtttttatttaaatatgttttttattatttttaaacttataatgttcctttgaaatgtactagactaatacaaaaattagcaatacttaacatggttgttttgccagttaaaaaaaccggggtgtattttaatatcacttcatatgttgtttgcctttcatttttccttaaagtagagcagtcacacatattcactgtttctcatttaataaatattgaaacatttcttttaacaaatactataaaagtatttatcagcactttttatttgctatttaagaagcatgatatactttggacttccacttgtaaatgattataagtactcatgtccttgtaagagtattcaaatttgatcattgtcagctagttttcttagatttctggtagccaaattttacttggctttcaatgagacatcttaaaacgtgagaatttttttagcttagaaatccttttttcaaattaacttagaataatttaaatcattggtcggcttgttgaaatttacccttagaactctggcctaccttgaaaaggagagctctcttcagaagaatgtttttcatattataaaatgactaggtctcataggaaatgcaagccacctgtattatttgcgtaagaaagaggcactccagaaggagaactttacttctttttcaaatcctacttaattgaattgtatctttagccacttagataataccttttgtggacctttttgttaaccttcatgagttgacctgatatggtactgtttgaaaagaaatagatcatttgataatgttcaaggattaaaagtcctcttgagaagatgccagtgttttctagtttacttaaaaactaaactgacagagatataatatgaaaaaacattttttacagtagggatcagccgaatatccctgtttatgttacatatttcatgtcaattggtcacgtagtggtggacacttttaaagcctaaatacaataaatgctcttgaatttcttacaaactttttgtcacttaagtaaaataataaataggattttatgaaatcctataggattttatgtaattgaaaagtgttaaatgataacagtagaaggaaatagctaaataatgtgaggattttctattttgaaaatgtgatttctcacccaaataatagtaattttgataaataatagagtgcttaaaaggttagcctaggatatgggagagaggatattactgtgactagattttctgatcttaaatatcgaaaataagtgagaatataagagagtttttcctgttttttaattaagaaaatattatttgtaacttcatgatgtagatagcatagaaataagacttgcttaaatttaatattaaatttttaactttgaaacattgttacagattgcagtgagtcaacctgaaattcctcttaggaatttcttaaatatagaaattaactccttaaaagccactccaaaccaaacatcttgaagtttttccctggagtatgtttattgttattaacaaaatgttatatattttttaagacagaataagagaaaggggaaacacaatgattttgaaatgcctggtaatttgtactgtctatgccaaaatctttgttttgtgtggaaatattaacacaaattaccctgtagctagaaagatttctccatgtgatataggtaacttagaaattgagttgattattaattctgttttccgaacttttttccagttaaaaaatttttttatagtaaagcagctgtgtttttaaaatggtggaattttgttttcattttcaagtttttagaacagtaccatgaatataagacacttgtattttatttaatcttcatctactttgaaagtgagtgtgatagtcataaagaaatttatacattgtatccctgtttccttcctcttcctaccctggctctgtccctgtcatccccacccaagatacgagttaaatctcatatgttaaaggtatcttcttaaaggaatcaaatgaccttggattgactttttttaaaagaagtagtggagatttggacttgactgcaaagtagagttttgtgtagtacttcttaccggactctctctactcccttcctccatgcttctctcaccgaagctgcgggatttttatctgtgcttggtgcaggggcgggggtgggagtgcaaggggtggagttaaaagaccagatacttcctgatcatttaaaatcctgcttaatgtgaatgagctagacaaaaagtgtacattgaaataataactactctctttaataagaaataatacagttaaaaaaaaaaggtgggggtaaatagctctacaacccagtttactgtttcaaaagcaatttctctttttaagcagacatttttacacacatgcatattttattacatccctttttaaaagtaaacagttgggacttagtatactcaaatatgcccatatcacatgtagatctagtttgtttcttttaaataaacacagataccttatggtgtagataaaagcattagtttataatatgaaaattaatattaggtaccctaagactctgtagtgataatgacattgatacattgtattggtgtgtgttccttcataatttcaggatactacccagaaaattatcattagaaattttttttttcttggcagactttcaaacctctggttgaaagaaatatacccagttcagtcactgcagtagaattccttgtagataagcaactggattttttaactgaagatagtgcctttcagccctaccaggtaagaaattttagattactttttaaaattaaaggttaattaaactttattgatattcagacattctttaaacaatattctttaaatatcatttcatctaacttctagttgtgtgaaaaacccaatgaatgcagtcagttgattttgcttataggataaacgatttattaattcaattaacaatatatactgagaacctactatgagccaggcagtgttctgttgcaaggaatacagaagtaaacaaaataaagtatctgacattctaaataatcattattagaaaataattggttaaatattagtataaattgtcttcaatgctaaacgttaagaattgggtaaattaatataattaaatgagattagtgtttatgtatacctatcagtttagcataatagttctttttttaaaggggaaatttttttagattgtcagtaattgaatgattttatatataaatttcagttctccattattgcaatttaaatacaaatacatttaattaggaaaacattttccagttgactattagcttttaattatgtgaagaaactcatcaaaagtattaagctaaatattttttaagattgttgaaattaccagttaattttttcaggtataagtaaagctcacagaattgtgtgtgtgtgtgtgtgtgtgtgtgwgtgtgtgtgtgtgtgtgtgtgtatgtgtatttttttttttttttttttccgtgatggagtctcactctttcacccaggctggaatgcagtggcacgttcttggttcactgcaacttccgcctcctgggttcaagcaatgctcctgcctcagcctccagagcagctgggatgacaggcacacaccaccacgcccagctaatttttgtatttttaatagagatggggtttcacaatgttggccagactggtctcgaactcctgacctcaagtggtctgcccgcctcggcctcccaaagtgctgggattacaggcgtgagccaccacacctggccttcatttgtatatttagagtttaggttgaattaaatggatatattatagatttctttttactcagatgttttaaaataatacagtaattgcatggaaagaaaggatgagtgaaccagtttaaattttttctaatggagtaaaaagttaatactattttatttcagacttgttactgtttttcaaaaataaaatgtagagctattatttccatggagagaacaagagcttgtgttaatgagcagttatttgttgtgcatggatttgtaatacttagggaattagaatagttctcttaggtccaccaaaatgagatgttagttcatttagtgtaaacattatttcatgttttgaagtctatatagatgtgctcttgtctttccacttgatttttcttgtttctttaaaggacctagtttttttgtattgttagcttttgttctttgtttataatatttatttcatagcaaatcccaatttaatagtggaggtgttggagcttttccctggggttttattttgttaattgtgaataccatttagtttactacagaccttatcatttcatttcccccagtcagttagagggagttagagtaggtgaatctaggtgaaatcaaaggaaccttccaaatcttaatgttttaattctgtggttgtattattagcacttttggaaccaagtttcagcttggatttggtttagagaagtgaaatcgttatgtagaaattacttttaaaaataaactcttgccaggtggcctaaaactcgacatgtttttgaaaattacaatgattgaaagaatatgctgggggagagtgggggggtaccctaactttttttaaaacagtttgagaggcataagagctaaagtcttaacgcagtttagtgaattgtatgtttgtctctgttagtaagctatttaatctgctctgctagtgtatatactaagtcaccctctggcctagaaggatgccatatcttccagaagtgaagtgattgacttgacattttaaccattgtgtttctgaaaaatgtgaattccgagttcaaagaaatcagtaggaattaacatgagagcacttgatttgggatctagcataccttagttttagaatttcttacgaattttagactaagtgctggtttatagcagagcttttctatgtgcattttttatagttagggtttttaaataagatcaggttataaatataaaaatattttctcccatgtgtaaatgatagacatttatcttattttgaatgaaaatttactacagatacctaagatggttaaatttatttatttaaataaatcttatgaaatacagaaatgttctagaaagaagaaaaaaaaatttagagttcgtgtaattacaatggctstataccagattgattgttttctaaccagttgtccaagcagtacattaaattccttagcttcttaaaatggcagctgttactggcataaattttgtaaatagtgccttgacctatctcaaccttagggtaaccctctgtaagtcaaggggagtttgggtacacttgaataagctttttaattgagcttatttctttctcactttttaaaatttcatgaggcagtttcttaatatggatgctaattatcctttataaactttttaagtaggtgggggaaaattctctttggaaatggcctttgtgtatattattttttagtctagagtggtaggtacatgtaagtttttaaaatttccagaaatgatgctttgctgtgaatctaattaaatgttttcagtgggaattcccagtctgccacctttatccttgatttctcagcattttattcagtagcagtatgtttttctttagtttcctttacaagttgcacagccttattcttcattaaatcagaatgataaactaaggtagtggttaggaaacagatgagtcaggattaatacaagtcctttcacttttaagtcattggtttgaagcccactcttttctctgaatgatttgaatgtattgaatatcagatagcaagtattaagttagttaacctggtcagctttttttcttcttcttctttttttttctgtcgctcaggctggagtgctgtggcacaatctcagctcactgcaacctccgcctcccggtttcaagaaattcttctgcctcatcctcctgagtaactgggattacaggtgtgcaccaccactcccagctaatatttgtattttcagtagagatgggttttcgccatgttgaccaggctggtcttgaactcctgacctcagatgatccaccccgccttggcctccaaaagtactgagaatacagttgtgagccactgcgcccggcactggtcagatttttgggtgacgtttagttgggtattccaggatgcaatcattatatattatagtttttagtattttggaaagaaacatgactaaaaagagaaattgaaccaacattttcagagagtataatggatatatattaattaggccactgaagcaacaggccccgatattgttaagtgtctttctccttccctgtgcacacaaataagtttctacttcctccttttaggtttcctgatcatgcctggctacacttaacattctttgaagtaggggggaagggaaaagggagaggaagcagtggggaaatctgcagattctactgtgttttttagctagctgggaagaaggaggagaaaataaattattgcttcttaaaggtacttttaatagttttttgttacgccaggcacggtggctcatgcctgtaatcccagcactttgagaagccgaagcgggcggatcatgaggtcaggagttcgagaccaccctggccaacatggtgaaatgcagtctctactaaaaatacaaaaaaaaaattaaccgggcgtggtggcgggcgcctgtaatcccagctactttggaggctgaagcaggagaatcgcttgaacctgggaggcagaggtttcagtgagccgagaccgcgccactgcactctagcctgggcaacagagcgtgactacatctcaaaaaaaaatagttttttttttgttgttactataatctctgtggtattgttgctttactttggagtatgattatagaagttcaaaaaaactttccattaaattttgataacagttttgatcacattcacataaaaattttgataatgaaatgaaatatttagcttttagcatgattttgaaatcattttatcatggattttggctactggccgtgcacacacctacagttttcaggttggggttgcttcatagagaatgtggaagagattatttcttacctgaaagttgtacatgattcataccaactaacctggcttggtctggcttgttagtccagtatttttaggcatcacattcctctttgcttttaaatgtaataaagaaataaaacaaaggtcactagttaaaaccgttagagatttgatacggaatgtggttgtccaaaattataccgcatgtttatcttacagtatattaaaattcattgtagtaatgaggtgttttccctaaaataaggtagaatcataaatcctagacctgaaggaatgattccattagaagttctggatcccagctactctggaggctgaggcaagagaatcacttgaacccaggaggtggaggttgcagtgagccgagatcacaccattgcactccagcctgggcaataagagtgaaactctgtctcaaaaaaaaagttctgtatcataatgagctgataaagtttggagataagactgttaatactacagttctatcattgtagagtatggacattgaactacagtactttactaaatactaaatacagtactgttgtgctgtgaattgctggttgaagggaatgggtagaacaaacctgagtattttcttagtacctggactaaagattgcttaaagacttaaccagagaagactcacacattgtctagtaaatgaatgtgtctggactgtgccagattgtttatctatttctgtagtctttcaatgatagtttttccagtttgaatccattttaacccatatttctttcatcattgatcatataaatttattggctgtggtttctgaatatccctaaggtaattgttgctcaacacatctgttttactaaaaatagctcaaacagttgcctagggtaagtttgcagtagtttagggagtagagtgtaccagagacatgtattttttttttctcctaaatttgtgttactgtcctatggcatttggaattgcttcacaaccaggatggaataatgcaaataaggtgaaattttagccattagtcagccaaggtgaacaatttaaccagttgtttggtcgttactagacaaatgttgtaatttgttgaattaaatatttgacataagtggtccactgacaaagtttgaaatcttgttgatagaggtttgtttataagcagatttatttctcagggtaatatgatattactagtagtttacagaaagaagtaaacagaacttcctgttacagtgctttgtatggtggagaagggacttgctttttcaaactttaccttcacttcagcttatagtacagacagatcactttagattgttttaaaaatgtaacatttctatagtgtgaatgagaatttgacctggtacagtatttattagtatacttccgtaattatttttgtcctacagttcctttcagatttgtcattttcgtggtatcatgtcactgctctagcattactttttaccaatttcacggctccctgctagttgtttaatgattttttaaagttgataaaagtcttgtaagtaatgatctttatcttattgtcaagaagtttataatctatgataagaactgacataaaaaatgacttccttgaagtagactggatttaaggagcctgaagtaaaaacttccgaaatacaaagataggagaagtcaataaagactgaaatggttaaagaagtaagtgaaaggatgaggtggggttggtggggtggttggtggtggcggtggtaatggtaatccagacatttgccaggaggaacagcataattggtgttgaagtattttaggggacagtagaatgtcagcttagctaaagaagagagtttatgaatagaattaatrctggatacacatggtgtggggtcagacaaaagaggaaaagatcactaagcacagttctcaggagagtaacaaaattatctgtgtaacaatggcatgttggttattgtaaatatcagaagcagctaattgattgggtcttcactagaaccttttagagattcattgtagcataatggttaagagcatgaattttgacatcagttcaagcaaacttagtttcaaattttacctttagcatttgttagctagttcacattgggaaagtctcagctgctctgaataaatggtttcctcaactgtaaatactgtctacctcagggttgttagaaagattaaatgaaatgatacagtaaagagtttatagtacagaaactgctcaataagagacatattgtaaatttcccttttcataaatggtatcttaaacctttttcgtggatatttgaaactcctttctcttcctaccattcacacactcattgactatttctctgccaccatctgctgcttacttctaacaatctttcttactagtcttccctagaactcttagcatttttttctccagctggtgctaaacaaactttttcaactctcaatataacccatagacagtgtataatagaacacgtttttgtagtagtgtttttttcttctcccagtttttatgaagaataagtaggtaagatttcattgtgacttcttaaactattattttaagaaaatgatattagaaaagatgacaacaaaactgtaytgtggtggtatcctttacagcacacccttaccttttttccacagggaaagtcatgtactctacttgttgctgatagttatttttctctcagaaagtagaagtgatattcaataaggtacaaaattatttttctttgtttggctctgggaagacactttgtagctataatactaaggtctagaagtcccctaagcattaaataaaagagttagactaaatgacctttgtagcagtgagtacactagctctgtgarcttgttaaaggtgaaaaaacagccttctctggtcaacattaaacgaatcaagccctaattattttagtctttaggataagaggcattcaactaaagctaggtttatcttaaaagaacttttcagttagagtgccagatgcaaatcagatgttctgcagaattggaaaaccaggatcatttagattaatrgtacttactcagcactttctattctctttttctttttccttttctttctttttttttttttttttgagatgaagtctcactctgtcacccaggctggagtgatctcagctcactgcaacctccatctccctggttcaagtgattctcccacatcagcctcctcagtagctgggactacaggtgcgagccaccacgcccggctaattttttgtgtttttagtagagacagggtttcaccagtgttggccaggatgttctcgaactcctaacctcaagtaatcctcccacctcggcctcccaacgtgttcggattacaggtgtaagccactgygcctggctactctctttttctatatctgtttctggattatattttgacaggcgtcgaacacattcccagttactccctgacttttcatatgcatctcccttttccatttcactttgccttcattttaacatttgattaaaatttagaggtgccttgttgacataaaatcagtaaaatgagaacagttgtggcatatatactgtgccaaaagtattaaaaatacataactatgaactgactactggtagattattggcttggtaggatgagcatccatgggcaggcaaagcctgggggtggtctaggagacgaggccagaacaggaaacagctattttgtaatatttggctttattccatttcaagtcaaaagtgacagcttgcaatagtagagctaagctgaagcctcgatagtaggatggacaacaagaaaagaggaaccagcagctaaagcagagtcaatatacttccttgttttttaaaaattatttttaatataaagttgccatatcatgttttaatattcagtaattttgctctgtattctatttaaatattccattacctacctatatgattttatatagctataatttcaaaaatagtaatgaaacatgcttattaaggtcccataaattaccccagtacatatctgttgctatttaaaaaaggagctcttcatttgtaaaaattggttgcgaaacttgatgtgttgaaaatgtatccttggagtttaggaacatgttattttgactgaaatttggcccaagtatgagctattctgcaatattcagattaaaaacatttataagtcactgcagtagttctttcctggtcccaaatctgctgtgatcatatgctgaaaaatctgccagtctccttttaaattttcatagctgctgctatgaatttaaagtatgtgaaattatgcttgtagactctaagccatcactagttaccattgagaaagattttctggtttcttttttccaatcaaaataagatcataggattgatttattctttttcttaattgcataatcttactgaagcatgtcatattatttaaaatctcagaattagagttttattcctcagtataatagtaatattttactagaattagaatttaattttgggaatttgatcattcccaaaatattttcatgtgcattattttatttccaatgttagctttatgaggaaaatagattgtattctcttattttgtgtaatgctttcaggatatatattaatttattaatccacacaactgtttgagaagtctaacttacagatgagaaggaagcaaaaatagaaacgatgtaaagtagattaagttttaaaagggtgtgagtattgtgatgatatagcaggcaatgtcatggtacatccatttcaagaaagtacagctgaactttactcagactggaattgggaactagaaagttaggaactcaagtcacatattccctttaaaccctctccagaatctcctttttttgacgggtttattctgctaactcatagataytgcttctcataacactagttttcatttgacttacgtgtgtcagtatcaattcacctacctgtccccgctcctttacaagaccttttaaatctaatatttatgttttctactaaaattacagatagatggcataggggaatgaaacgttgaaaagaagaaataaatataaggaagagaatatatggtagtaattttctgtggtaggcagagaaagtgaggtttagctcagctgtgacttggcatctaggttcacacagcttgtgatagtcaaaaaagaacctgtgttgggtatggtggatcacaactgtaatcctagcactttgggaggccgaggtgggaggattgcttgagctcaggcatttgagactgggtaacatgggagaacccctgtctacaaaaaaataaaattagcagggcatggtggtgcacgtgtatagtcccagctactggggaggctaaggcaggaggatcgcttgagcccaggaggttgaggctacagtgagccatggtctygccactgcacttgagcctgggtgacagagggagaccctatctcataaaaaaaaaagggggggagctatgctgcatagtggcacacacctgtaatctcagcactttgggaggctcaggcaggcagatcacttgagctcaggagctcgagaccagcctgagcagcatggcaaaactccatctctaccagtaccaaaaacaaaacaaaaacaaaaaaaacttttgcgggacacctgtagtcccaactacttgggaggcggggatgggaggattgcttgagcccaggaggtcaaggctgcaatgagctgagatcctgccattgcaatctagcctgggtgacaaagtgagactcttgtctcaaaaaaaacctgaactcaaaattttagagtataagatattatttctgttacactgcctgcctttgtgagccatccagtgtgaagtgtctcctatttacatatcattctcttttgtgtggcactttatttttcttatagttaatatctttcctaaataaaagactaagtttttcctgaattttattgcctgtacaatttcacctagattttgcgtacactggcatcaagctacactccaaatctgtgcattattttcagattcatttgttccctcggcaggtaatccatattaagatgttttctagtctcttttttttcagctgtctagttttgttttgctgttttttgtttgtttgtttgtttgtttttttggttgtgcataygggtattctgaatacctagattcgctcaaagctaaaattcaaaaataaaatactttaaaatgaagcccttgtcagtctcttgccaaaacagttgtctctaaaattcaagtctttctaggcttcagactaaaaacaaaacagtactggtccttagtcattaaataatctggattgagagtcattaattcatatatttaasggccaggtttgttatgttcagaactacaaataccttcaaagaacctagaatttaatgggggaaacacacatagaaaaacaaatataagcaaaatgtagtaagtagcagagaccagggaggaataaggaattcattctggtcgtagggatgcggaggtattgttagaattagagtaggtgacccctgagttacatcaggatgaatagaaattagctaagccactaggacatcacggttggttaaataccaccgcgcctggtgcagtattacaccatatttttaaaaaatgaggccgggcgcggtggctcacgcctgtaatcccagcacttggggaggctgaagtgggcggatcacctgagttcaggagttcaaaaccagcctagccaacatggtgaaaccccatctctactaaaaatacaaaaaaattagctggacatggtggcgggcgcctgtattcccagctactcgggagtctgaggcaggagaatcgtttgagcccgggaggcagaggttgcagtgagccgagatcgtgcctgtgcactacagcctgggcgacagagcaagacttcgtctcaaaaaaaaaaaaaaggtgtaatataaaggtccagtttcattgttttgcatgtgaatatccagtttccccagcaccactttttgaaaagttgtcctttccacattgagtgctcttcccacccttgaaatcagttgaccatttgtgtaacagtttatttctgtgctctctattctggtcccttggtctatatatctgtccttacgcaagtatcacactgktttgattacttccagtaccttatttttycccccacttttctaccgctgaataatttgttcaaatgattgctcactctaagataaatcattaaagtgtactattctgttttggtgaaatttactgaaataccagatcaatgtcttgagtataactcctgccttgtaaattattaggcataagacctcccttgtargaaacatatgtttttaagattcgaggaaaaagaagatcctgtgattgctgagctataacatayaggcattcatttattgctgtgtgccagtcactttgctctaaatgtgaactcaaagacagataaaatacttgattctctttcaggtcataaatattacagcaacatgccagaagttctgaaatagagctgtatgcatagtattttgtagtatagaatcagctgatgggggaatatcttatggttgcctgtttctttttctttacttctcagaagactagggttctgtagtagtgtttctcagtagagtgctgtattagggttctcctcatacagtaccagtatgggatgtggcaagtggggttgtatatatgtttgtgtatagaaattgagaaagaggagatttttattgattggctcttggaattgtggggactaacaagtccaaattccacatggtagaccagcaggctagtagttcaggcaagacttgctgctgcagtctttgagtctgaaaggcagtatgaaggcagaatccatttttccttgagagaccttagtcttttttcttaaggccttcaactgattggattaaacctatccatgtgttaggggtaatctgctttactcagagtctgctggtttaaatggtaatcacatctaaaaatacttccagagcaacatctggaatgatgtttgaccagaccactaggcaacatttcctagtcaagttgacacttaaaattaacagtcatggctgttattcatatttgattcttagttttgtcatgcatttgtagcatagtaggaatctgtacctctgacttagcaaataaaatgcctttggcaagttctctcattcattaatggatatccctgagccatttcccatcccctttcarcctttatttagagccattgggataggtatagattaagacaattgggaaagtgagagcctttatttattttctttgagacggagtcttgctctgtcaccccaggctggagtgcagtggcacgatcttgtctcaactgcagcctccacctcctgggttcaaacaattcttctgcttcagcctcccgagtagttgggattacaggcacactccaccatgcccagctaatttttgtatttttagtagaggcggggttttaccatgttggccaggctggtcttgaactcctgaccttgtgatccgcccacctcagccacccaagtggaagcctttaaaataatcttgccaagttgacgaagaagtgggcaacagacagcaaagtatttatgtggcataccaggtgctttcagcatcctaaatatgagaaagtatagtatctgtctttcctttctgaatggttataatagttctgcttcctcctgagtctttagatactatggtgttttctcctggctgtccacaatctcctttcagtccagtctaattccagatcaaattcttctaatatcttcttcagattgcttcactcaagtattcttagctgtctagacctagttatttaataaaagttgttaattataaatgaggaatctttcacatttgcacttaaataggaatactaatatattccaatgtatctgtcagttgtgtaaagtaataaggtatttttaaaataaatgcaatgcatttattttagtaaaaaatcacaataacaacaaaaatacccagtgctttttcagatgttctttgcctgagagtccagtacaatatatggaactaattcccaattgacagcccttttcccatttgccatttatggaatagccatttttgtaaatgttgaattctgtataacaaggatgaatcaacaacacgatatatgagatctctttgtatatgtaaagtcttcaagccaaaaggcccaaaacatccagtatgtggacttgaaaaacgcaatacctaggctagttgtggtggctcatgcctaggctggttatggtggcttatgcttgtaatcctagtgctttgggaggctgagacaggaggatcacttgaggctaggagtttgatattagcctgggcaacataacgagaccctgtctctaaaaataaaaataaaaatttagccacatgtggtgccatgcacctgtagtcccagctactcgggaggctgaggtgggaggattgcttgagcccaggagatcgaggctgcagtgagctatgattgtgccactgcactcaagccagggtaacggagtgagatactctcccttaaaaacaaaaataaaagcaaaaataccatacctaacccacctccaaaggatgagtttctaactgtttctctcatcgcacatccatatcgtttttcaaggtcattaagttccatcacatattaacagttccttccagtgtttaacaaaacctagtgttaagaatttttcttaatatttattgcatatatatcagtcaggaaattttacatcagttggtagcatctgcttggcatgttagtgttgggaagcattgtgaggctctaccctggctaagtaagagtgtgcagttaattagtgatacccactaccagcactataaatgagcgttgaactgctgatttgtttttattagtcttgatcacttccaaggtatcttttcctcatcttgtcttgtctataaatatacgtacttatctgtatttatatttaaaaattcttttggcttggtgcagtggcttaagcctataatcctaccactttaagagccaaagcaggaggatcacttgaggccaagagttcaagactagcctgggcaacatagcaagaccctgtttctacaaaaaaataaaatcagccaggcatggctaattttggtgtgtggctgtagtctcagctacctggaaaactgaggcaggaggatcacttgtgccccaggagttgaaggggctgtagtgagctatgattatgcgattgcacaccagcctaggtaacagagggaaaccctgtctcttaaaaaaaaagaaaaattatcaatacataatagatgtacatgtattggggggtacatgtgataatttaatacatttatataatttctaaagatcaaatcattgtaattgggatgtccaacaccttaaatatttgtcttgtctttttcttttttctttttttttttttaagatggagtctcactctgtagcccaggctagaatgcagtggtgcaatcttggcccagtgcgaactctgcctcccggattaaagcgattctcctgcctcagcctcccgagtagttgggactacaggcgcacgccaccacgcctggctaatttttgtattttttagtagagacggggtttcaccttattggacaggctggtctggaactcctgaccttgtgatctgcctgccttggcctcccaaagtgctgggattacaggcatgatccactgtgcccggcccaatatttatcttttctttatgccataaacaaattattctcttccacctatttggaaatacacaatagattgttgtgctgtatagtcaccctactgatctataaaccataggtcttatttattctgttgaattgtatatttatatccattaatcaaactcttttcatcctccctcccccaaccctaacaggtctctggtaaccaccaatctactgtctatctttaagcatctgctttttgttgttgttgttttgttttttcttgagacggagtctcactgtgtcacccaggctgaagtgcaatggtgcaacctcacctgactgcaacctctgcctcccaggttcaaacgattctcctgcctcagccttctgagtagctgggattacaggcgcttaccaccatgtccagctaatttttgtatttttagtagagacagggttttatcatgctggtcagtctggtcttgaactcctgacctcaggtgatccacccgccttggcctcccaaagtgctgggattacaggcgtgagccaccactcctggccaagcatccacttgttaacctcccacatatcagtgacaacatgtgatcatttgtcttcctgtccttcgcttatttcatttaacgtaataacctccacttccatccatgttgtggcacataacaagttttcattctttttatggccaggacaatattcattatgtacgtataccacatttcctatatcattcgtccattgatgagcacttaggtggagtccatattttggctattgtgtatagtgctgcagtaaacatagaaatgcagctatctctttgatatattgattttatttcttttggatgtatatccagtagtggaactgctggatcatagttatatttttagttttctgagaagtttccatgttgtttttcacaataacgctactaatttacatttccaccaacagcgtacaggttccccttttcccacatattcaacagtgtccatcattattccctgtcatttatttatttatttatttatttatttatttatctatctatctatctattgagatgaggtctcattctgttgcccaggctggagtacagtggcacaatctgagctcactgcaacctctgcctcccggattcaagtgattctcctgcctcggcttccggggtagctgggtttacaggcacctgccaccacgcccagctaatttttgtatttttagtagagacagggtttcaccatgttggttgctttttctttggggtttgaaaaacttccctgtgttagcaacttgaccaccatgttggtcaggctggtctcgatctcctgaccttgtgatccacctgcctcggcctcccaaagtgctgggattacaggtgtgaaacaccgtgcctggccttctgctaaattttttaataaaaatgtttaattgtggtaaaatatactgcttcagcgtcctgagtggctgggatacaggcgcccgccaccacacccagctaatttctgtatttttagtagagacagggtttcaccatgttggccaggctggtctcagactcctgaccttaagtgatccactacctcggcttcccacagtgctaggattacagtcatgagccactgtaccaggcctatagtttcctttttttgttgtgtctgggtaatactggcctcaaggaatgagtttggaagtattccctcctcttctttgtttgttttgttttgttttgttttgttttatgcatttgagtatgattcatatagaattcagtagtaaagtcattagatcctggacttttctttggaaaagaaatgggaaaagatgcaaggtttttgtttctttttttttttttttttttggctctgtcacccaggctggtgtgcggtggctcagtcttggctcactgcagtcttcgcctctctggcccaagcaattctcctgcctcaacctccaagtagctgggactacaggcatgcacaaccatacattttgtatgttttgtagaggcagggtttcaccatgttggccaggctggtcttgaactcctgggctcaagtgatccaccttctttgtcctttcaaagtgttgggattacaggtttgagccaccatgcctggctgggagatttttaattaaggctttgattccattatttgttactggtttgttgaggttttcttttctttcctggttcaattttggtaggttgtgtgtccatgaatttatccatttttctgggtttttcaatttgttagcttgtatagttgttgatagtagtctctaatgagtctttgtatttctgaggtctcagctatatcttttttttccatttctaatttatttgggtcttctcctttttttcctcagtctagctaaatatttattgattttatctatcttttcaaaatccagcttttcatttttttaaaattttcttctgttttttgtttttttgtttttgtttttgttttttttgtctcagtttatttccgttctcacttttattatgtccctcttactactaattttggatttagtttgttcttttgtagttccttggagtgcattgttgcgttgtatatttgaagtctactttttaaatatagatgtttattgctgtaaactttcctcttagtatcgcttttgccaaatcccgtagattttgtgtttggttttcatttttttcaagaaattaaaaaaaatttaattaagtttctttattgacctattcgttgttcaggagcatgttgtttaatttccatgtatttgtgtgttttcagaggtttcccttgctactgatttctaggtttattctgttgtggtcagaaaagacagtttgccgtatgattttcgcttttttgaatttgttgaggcttgtttcrtggcattgtattgtctgtgtatttgattttaccagtagcttttatatttttaaatattttcttttttgtacattatttgtttttctttctgattgaagaacttatatcttacattcctgtaagatgagtctggtggtgataaattctctcaggttttgtttcttaggaaaaaaaaattctctctccattttatttgaagtatagctttgctagagacagtattcttgcatgtcagtgtttttgttttgttttgttttttatttttattttcatcactttgaaaatgttgtcgccctcccttcttacctgtatgatttccattgagaagtctgttgggagccaaattgaatctctatgtttttacttttctcatgcttcttttaggatcctctcttcgtttttgaccttttgagagtctgattattatatatgccttggggtagtcttatttgggtcacatctgtttggtatgtctgaccttcctttacctggattttatctccttctcaagttttgaaaagttttctgttattattgctttccactttctgctgtttctccacttcctcttaaataccaataattcttagatttggtctttttaggtaattttgtatatgtcttttaggttatcttcatttcttttcattgttgtttttttcttctctgacaggattcttaaatagcctatctttgagctcactgattctttcctctcttcattctgttgttgaaagtctctgatatgtttgcatgtgtccccacccaaatctcatcttgaattgtaactcccacagttcccacatgtcctgggagggtcccagtgggaggtgattgaatcactggagtgtgtctgttcttgtgatagtgaataagtctcacgagatctgatggctttaaagagaggagttcccggccgggctggtggctcacgcctgtaatcccagcactttgggaggccaaggcaggaggatcacctgaggtcaagagttcgagaccagcctggccaacatggtgaaacctcctctctactaaaaatacaaaaattagccaggcgtggtggcaggtgcctgtaatcccagctacttgggaggctgaggcaggagaattgcttgaacctgggaggcagagattgcagtgagctgagatcccgccactgcagtccagcctgggggacaagagcaagacttcatctcaaaaaaaaaaaaaaaaaaaaagagttcccctgcagaagctccctctctttgcctgctgctatccatgtgaaacatgacttgctcctccttgccttctgccataattgtgaggcctccctagccatgtggaactgtaagtctattaaatctttttcttttgtaaattgcccagtctggggtatatctttatcagccgtgtgaaaacagactaataatacagcctctaatgaaatatttggctcagaaaatatgtttctcaattctaaggtttttatttggttttaaaaaattgttatttcaatctctttgttaaatttctctcataattttttttaatctctctttttttttttttttttttttgagacagagtctcactctgttgcccaggctggagtgcagtggcacgatctctgctcactgcaagctccacctcttgggttcaggttctcatgcctcagcctcccgaatagctaggattacaggcacctgccaccatgcccagctactttttgtatttttagtagaagtggggtttcaccatgttggtcaggctggtctcgaactcctgaccacaagtgatccggctgccttggcctcccaaagtgctgggattacaggcgtgagccaccgcacccagccttaatttcttttaattgttctcccccctccccccccctttttttttaagagaaggagtgttgctctgtcacccagggtgatgtggaatgcagtggcgtgattgtagctcactgcagcctcagtctcttgaggacgataggtgcgcaccaccaccccggctgattttgataaatttatgaattgcttttctgtgttatcttggagatcactctgttttcttaaaacagctgttttgaatttttcatttaagagttcacacagtgccaccttgttagggtcaatcactgttttcttgctttatttgggtatgtcatgattccctgtttgctgttgtttcttttggatgtatgtctatgtctttgcattgaaggattggttattctagacttctctgactggcgtgttttggctttaattagatatttttgcttagactttttaaataatttacctttcttgttttccccagtagtttgctgcctccttttcggcactaaatgacatcttaagcccagatttgccttggttctagtaaacagtcaggagtgccaggagtcccaaattgcagtggtcccaaagtggagaatatcctggtagtgcgaagactagctaggggtttgtgcctcgggtacctgtggaactaatctccacagcatggtgctgctgaactgccactctgatatggcatctcctttgtctaatttatggagcagagtttccaggactggggatggtagtccttctctgcttcctttgtttctggctgtcctcagggatatttctccctttgggtgttcctgatgcttcctgtcagttgaggcagggatagatctcctgccagaaaaccccaggtggtagggaagctggttgtccaccttgatcttactttttccagtgttgtagaaaccataagttggtgggaaagtgtggtcctgggcagattgctgggaggggcactgcagatagaaagtgagattctctctcaaaataaataaatagaaagtccaattctcttattatctgcttctggttttttcacttctctgtggccccaggactgtctccctctcatatttgaggtctgggatgttattggtgataatctcagcattgtgtatttcttttttgttttctactgaggggagtgaacccaaacattgtcattttggaactggaagtctgtacttgtattttttatcaatttaatttggctggtggtacaaggtgggtatttctgcctttgtaccaagaacttcgagaactgatttattgctaatattatttaaaatcagaagttgcttacaaattagtgaaaaaaaattttttttgagacagaattttgctcttcttgcccatgctggagtgcaatggcgtgatctcggctcagcgcaacttccgcttcccaggttcaagcgattcttctgcctcagcctcccaagtagctgggattacaggcatgcaccaccatgcctggctaattttgtatttttggtagagatggggcttctccatgttggtcaggctggtcccgagctcccgacctcaggtgatactcccacctcagcctcccaaagtgctaggattacaggcgtgagccaccacgcctggccaaattaatcaaattttaagatatagagagaaccagaatcagctcacaacaattgtagaataagttactaaattctattgagattttgttgaaagatacctatctagccatatatatatttatatatatatwtatatatataatttatgttagtgtattttggctctttgagagaagtcaaagtttacatctgttaaaagtctcagaaattggcaatagaacaacagtccatcttggactccattcccaattttgttgcttactatctgaaatgctatgaaaggcatataaccacttaaccacttaaatttttatttttatctataaaataggtatgatatcattgccattgtctatgaggtaatatatatgaaaacactttgtactctaaattttttttaataaggagaatatatatggtcagagttaagaaaataaataggtctgtttgggtaaatctcagtttctgttctgtgtgctttcaagagactcattagaaaagtaatctgtttttgtttttgagacagagtctcgctctgttgcccaggctggagtgcagtggcgtggtctcgcttcactgcaacctccgcgtcctgggttcaagtgattctcctgcctcagcctttcaagttgctgggactgcaggcatgtgccaccatgcccagctaatttttgtatttttagaagagacagggtttgtttcaccatgttggccaggctggtgtcagactcctgacctcagatgatccacccaccttggcctcccaaagtgctgggattacaggtatgagccactacgcccggcctgcttttttcatgtatcctaaacctgctgtgtccgttattggtagctactagtcatatgtggctatttaaacgtaaattaaataaaactaaattttaaaaaagttcttcagtcgtgcaggtcacatttcaagtgcccagataatcgtatgtgggacagtgcatgtatataccatttatgctgtagaaaattcttctcaaccacttagcctctaaatgctgaatactgcacagaaaatgacatccatgtattttggtaccattgtattgtctccagtatcaccctagcccttagtatatcatttggcattcttttcgcatgcccctgtgaacttctgtttcctaaagtaattattccaaattatcactactttactcagcttcctccttttctcttaatagatgatctttctcctgttgcacaaaggaaattgaggttataagcaggaaccccgttagcttcctgttctcatatctatttttgtacctctccttacctgctttcctcttgtcttagagatgtgtctgttttaacttctactacttcagttttacaaatatgtattagatacctgctacatctcaggtactactttaggtatttagggtacagccatgaacaaaacaaaacaaaaatttgttgcctcctataacttaccttcttgtgggaaaagacagatggcaaacaaaataactgtttagcatattagaagacagtagtactatggagaaaagtaaagcctggaaagtgacaggaagtgtcagttggaacagaaaatggataggccctaaagcaagaagattgaaaaaataacatactatgtgaaaattagtagaaaatgatgtagaaaggctataagggtaaattaaattgggctttttaggctattataaagactttattttttattctgattaagcttggagtgaaagcctttgaagcattttgagcagaaaagtaatatgataaaactttttcccttatataaataattttaaacctatgtagttatagaatagtaaaatgtgcttccatgtagcatgcagctttaacaattatcgatttgtggccagtattgtttcactttactgctcgtcttctgtcatagatattcccctatgtatgatagtttgacttaggactttttgacttcacaagggtgaaaaaggagcattcagtatgttcctgagctttcaacttaatattttcagtttaggatgggtttatctggatgtaaccccttcataagtcgagcatccgtatttcaaagcagatcccacacactgtattattttgcccctaaatttctaagtgtgtgtgtatgtgcataaattaaaacagtctagctctatagtcgagtctcattcacagtacttatgttttataataccgccacttctcagcaacaccaggaatgataagagtatcataggcttactcatttgctttgtcttacattatgtaaccactagacttagaataacaatactaaggttaccaccaatggtataattgctgaaaacagtgtatttttttgttccagttctttttatccttaggagatatcccgctggtcatatactcaatttattgtgttttgtagtcgtttggaattgttcctctctctgccttatgttttaaaaagctaatatcttttgtattctagaacctgtcttcacagatacttttctaagtttaccaaatcttaagcctatttttctttcattgcttttcttttcattatataaactcaaccctctaatataaaaaactaaaagttatcacacccagtctggttatggccttatcttactcctttccttcatagctggacttcttataatgtgaaccgttatatctatattttcttgcttcccaataatatcttcagttattgcagcctggtttcttcctccacttcacaaaactgatgttgctaagatggctaatcatctcttagttactgcatttaatattcaagtgtgcatcactgtcctactgaacctttgcatttaacactggatcactgtccttttggaaattctttgttcctgttgctactctgatacttctcttcaggttttcctattttttwaatcagtctttgctgtatgtttgttctctctgtagaagatttagtgtttatgtgatttttttttgtagtgctccttattttctgtagtgttcctttttggttttttccatttcactactcaccctaagccgtgtcacatttccactgtcttttaaaaccctgtcttctgaatccaaaactccagacctctctgctctaccattatttaataactgtttactaagcatcttctctgtgccaggcagtattcatacaaaatttcctgcccccatggagttaaaattctggagaggccaggtagataataagtgtaataagtaacttatatagtgtgatatacaatgtaataaatgcgatgacaaaatgaaaatgtaaagcagtgtaagatcaataaggattggggaggggagaagcagatatttaatagaatgttcagagtagatatcattgaaaaggtgaaacccatgtcttctgctgtctatttactgtattcacattcaaccatcagaccttgatttcgtttttcttcctgatcattctgtatcccagctaatgagatcaatcacatctatgccagtttgtcacttaaatcaacatgtagggccaggagcggtgrctcacgcctataatcccagcacttaggaggccaaggtgggtggatcacctgaggtcaagagtytgagaccatcctggccaacatggcaaaacccccgtttctactaaaaatacaaaaattagccgtgtgtggtggcacatgcctgtagtcccagctactcaggaggctgaggcaggagaattgcttgaacccaggaaacggaggttgcagtgagccaagattgtgccacagcactccagcctgggtgacagagcgagacgcaagtctcaaaaaaaaaatcaacatgtaggaatgttttaggtctctctcttgcccttacatattagtctcccagaattactaattctgcctctttaactttgcttaatctgtcccttctcctctatcgtaaggctcccatccttacccgcctagactattacagaacactccaaactacagtctttcagttttcttcctcacctactctgctgtcctyaattcaatccataccagtgtacttgtccctatattccataytgtttcacccatctattcttgcgtatgaattttcctctgtctgaaagaccttcttttctgatctcttattatctggcagatgcccttgcagttttgaagttccaactcaaaaaccttggtttcatacttttcttgagtctcaactcaaatatttccttctctgtaaatcctttcctgacacacctaactaggtcacccsccaacccattttgtctcacctttgtatcctagaggatacaaagatactttaatctgtatcgtatttgtgtgtctgtctcaattccactggattgtaagatccttgaggtcaggaactttgtcttagatatattgccagtgccttggcacagtaattgataccaggtgttcaaaatcttgttgaatgaaatatattcctaataaattttagtaatgagagcctcctagtcccacacttagactatttcaaacataattccaacaagctgtcaaatctagtttcccttaccatagcatatgagaagccaacactttaaaaagtggtgatggtagattggcagcttgacagcatgaggttatggaagaactaaaaaacagttacaactaaaattttgtctttctggaacaatttgttatagaggttacagtttacatcgattataactgcatcataatataaagataaccatgagtattaatttaaagaccttatgttcagtatgttatttcatgaaggaactctaaatatttttattcaaaattaatagaatttcagcaaattatgttatataaactccttttttaaagataaactataataagcatttaatatgcttcattcagtttatgttctcttcccttttttaaattaaattttctaaatacgttaaactttctaggagcagtaaaaaaaaaatgctgaaaggcatcgtaaagagtactatggataataccttccttaaaaattctaggtggctaatgtgcttttctattatgatacattggaattttagttatagcttccttcctttttttcttttttcttttttttttttttgagatggagtctcacactgtcacccaggctggagtgcagtggcacaatcttggcttgctgcaacctccacctcccaggttcaagcgattctcatgcctcagcctcccaagtagctgggattacaggcacctgcctccatacccggcttttttttttttttttttttttttttttagtagagacggggtttcactgtgttggccaggctggtctctaagttttgaccttgtgatctgctcaccttggtctcccaaagtgctaggattacaggcatgagccactgtgcctggccgcctttttttctttttgtgtaatttaacacatttcttatgtacaggttgagtatccctaatccaaaaatctaaaatctgaaaaaccccagaatctgaaacactcaaaggaagtgctcattggagcattttggatttcagattttctaattatgtgtgctcaactactaagcgtaatgcaaatgttacagaatttttaaaaatctgaaatctgaaacacttctgactccaagcattttggatacaacctgtatttgtaattgctctacaaagacctcagtgaaggaagtggatggactcaaataggtgtcataaaagactaagtcactgggcaagtctagcaagtcttgctgatcattccaatttgtactggattgtattcgttctttctgagaaaatagaagtatggtactatagttcatttatagattcatcatttccatagcactatatgctaaaagtgaaaatcagcccaaaaaacttcgatgtggtattaatttggaagttacattcattgcactgtatattaaaaaaaaattttttttagtgagtgtttggcgaggcacagtggctcacgcctgtaatcccagctctttgggaggccaaggcgggcagatcaccggaggtcaggagtttgaggccagcctgggcaacatggtgaaaccctgtctctactaaaaatacagaaattagctgggcatggtggcaggcacctgtaatcccagctactcgggaggctgaggcaggagaatcacttgaacctgggaagcggaggttgcagtgggccgagattgcgccattgcactccagcctgggggacaagagcaagatgtcttaaaaaaacaaaacaaaacaaaacaaaaacagtgtttgttctgtatgaatcaatcattgacacgattgtatatgtatactatttcaatattagttgtttttaaatatatatttagagacagggtctctctgtttcccaggctggtcttgaacacctggcctcaaatgatcttcctgcctcagcttctcaaagtgctggtattacaggcatgagccaccatgcccagcctcagtattagtttgtgcacaggaattttcagtagaatactttatacaagtatataattttacttcttttttgttgttgacctccctccccagcttcccaggaattttttacttcttaaagcttgggttgtgctggaggaatattttcagttactactttggaaaatattaaacagttcccaggccttcctgagtttgtttcagtttaagtttgaggaagctgcagttagtaaattgtggttggcagatgctgtaagcaggtgactcagtaggttaaactcatgatgactcaactgtgtaaaagtcatgccaataaatagcttgaaagaaaaactgccttccagacttttgaactgccataaaaagttcaaaactattattaaaagtatcacaaagaatattaacatgtggctttagaagaaaacacatttttcttcaagtggttttataatgttttcttaatttatctgatttttttactctggttattctgagaggagcggaccttataccaatgacacttagcaaattgtagttaaaatgcaggaatattacaggtctggatcaagtttattcaagggaatattgttatgaaagataggtttcagttgggtgatcaaccaagaaaccctattagtagttatttttaattaataaaaaagctagttaatagctgttaatgtaatattgctgtaaccgaatagataaagcaagatacacagttgtttgttgtgatttgatgtaataggacatgtatattaagatagtatatccaattccaaaattactcttgaggattttcataaattatataatctatttatgatatccatttctagtcttggaataccatattcttctaacctggttttaatttagctacgtcattttctgtttttaaaaataacaataaaatgattggataaattgggtcatcttcctttttatgtgaccatattcctaataatgtaggtaagttattgaaaacctagcagagagcatgcaaaattttgattatgcaagcgcatggatggggaaaagggtatgtgggaagtgctttgacattagacagacctttgctgatttgccttctagctgtgtgattttggagaaattacctaataatatcaaaatagcagaggtattgttaggattaaatgaggttaatctttgtgaaagtgcttctcttgtgacaatttaaaaaatcttttaatttacagtggcaagtaaatatgcttaactgttaaatagataaataatctttctgaataatagggaattgactgaattttggttttgtgttcatgctgattttctttctttctttctttttttgagaccaagttttgttcttgctgcccaggctggagtgcaatggcacaacctcggctcactgcaacctctgcctcgcgggttcaagcagttctcctgcctcatcctccctgatagctgggattacaggcgcttgccaccacacccagctaattttttgtatttttaggagcgatggggtttcactgtgttggccaggctggtctcgaactcgtgacctcaggcgatccacctgcctcagccttccaaagtgctgggattacaggcatgagccaccgtgcccggctgattttcttaaattgctatttatattggcaaaatacttatagaataaggcatttagtcttctagcacagtatctgaaacgctgcatcaagtttttaaaataaatacaaaatttattttacctggtgctttctaagttacaagtctgtttcttaaatgtgtatgttgtattactgtttttttcctagaacattaatcatcagatacatactatgtgatatgtttctgtataccacatctgttaagtaaagaaaatgtatgccctctagctaagttaaatttgaattttatgacttagttcataaaaaatgtattacagaattaaatttttatttttatgactagcaaaggttttataagaatttcatttgagtaatacctggtacaatcaatgtcgtactaatagaatagcattgttattttttattttattattattattttaaatagagacagggtctcactatgtttcctaggttagtcttgaactcctgacctcaagtgatcctcccgccttggcctcccaaagtgctaggattacaagcgtgaaccaccatgcccagcttaatattgcattaaataactcgttctttttataggcctttaacgatatttttagcaaatctaaaaatttaagtattaacatattaaaaggtttttttttataggatagggaaggtttttgtttttggtgttttttttttttttttttttttttttttaagaggaggtttctctctgttgatgaggctggagtgcagtggtgcgatcgtggctcactgcagcctctacctcccatgctcaagcaatcctcccacttcagcctctcaagtagctgggactacaggcatgcaccataacacctgcctaatttttgtatttcttgtagaaacagggtctcgccatgttgcccaggctggtctcaaactctgggctcagcgtttcacctgcctcagcctcccaaagtgctgtgattacattttgtttgttttcaagagactctaaacaagagtctgtcatgttacccatgctagacttctcgtaactctggatctcaagtgattaagtccaccttttaatgtgagtatttaaaagaatgcaaagagtattttcattttactctgttatcattaccaacaaaatttctaaattagctaggtttctatggagtatgcttatcatatttaactgtcagattatattgcattttttgttgaaactttgtaacaaaggaaattagtattactgtgaataaattgttggcatcagtctttttcatcttaaatgtttctttttctcattataaaagcaaaacatggtcattgcaaaataaaaaacttccagaaaaatacataaaagcatagcaaagtagattattcataactcagctaaagaaattactggtaatatctgttatatatcctggtggtggtgtgtgtgtgtgtgtgtgtgtgcacgcgcgtgtgtggatatatatatatatataatatgtatatatggagatacatatatatataaaatctttctagttggaaaagtaaaaggaatgtttttatggttctgtttgtgatcatttgagccaagataaaatatttttaaggctgtatcccattgcttaagtagatttcatttgggggatattttaattccaggacataaattctgacgaatataatgaaaacaattatattaaaatacccttgtatttgtcattaattctgttttgtttgcctggtgtgttttaatgtgattataatttgagatttgtttttttgggtgttgttagacatgaagtttaaaatttttttttaagtctaattttatcagtgctaatgttacagacagtgcttttctaagagttaaaatgactatactcttttatccttagggaaatatgcttaagaagtaaatcaggttattaatatgctgtgaagagtttgaaaacagtggtgctcagttgagcatattttagactatgcaggttaattggacacatttttaactataaaggattaactaaaattgtggcaaccttttcagccttgagattccattaaattgtagtgtgtttgcttgtttgtttttgtattgataatttttgtgaaagccttcaggtcagagtcacttttctagatcagaatgtcaaaattaactgagagagaataacttaaaatattcagtggaattagacagcattgtagttttctttttcactttaaatgaagtttgcagtaacatttgagttcccaagaattgtggtttgctaaaaatttgaacagaggaaaaatttaaaagtaaacagaaaatgaactttgaaattaatttaatggtgaatttatatataccaaataatgaaaatgacacaggaatgttatttcatgtaatcatattttaatttgaaaaatcatgagtccatagaaacatcatagaactttgtacataaaatgttaaaatcttgagactttaaaattcagaacccttttaccatttcataatttctcatgacatatacttctcttaaactttatcatttcctccttagtaattaatgatataagtagttgcaagcaatgccaaatggatgttccaaggagagatccctgaaatatctggatatataacagtgggttgcttatagcaacagcaaacttctaggtagatttcttaggactatggaatttttttccttcataacagttaatattcttggatcaagctgcaggttttagctatactcattctctctgaaatgaattattaaccagtatcagttttacatttttcatttcttttcatagrtaaaagtaaattatgttgtcattgtaaaggaccagatgcagttttaaaaaatttttaacattcatgggcttaataaaatttcttttctgaaacttttaaacaattttaaaagatcagtggttttttaatcaggacaactttgaaaagatgaacgtgttccagaaaggggatgacttcacattatagtaatatattgagaagatgattgttaagactatgacaaaaaaaaaactttagaagaagcagtatgaaaataagcccttaagggtaaaggagaccgggtgctgtggctcacgcctgtaattccaacactttgggaggccgaggcaggtggatcacatgaggtcaggaattcaagaccagcctggccaacatggtgaaacctcatctctactaaaaatacaaaaaattagctgggcatggtggcagtgcctgtaatcccagctactcaggagrctgaggcaggagaattgcttgaacccaggagacggaggctgcagtgagctgtgatcacaccattgcactccagcctgagtgacaagagcgagactctgtctagaggaaaaaaagagtaaaggagatagtctattttcttgttttattttattttatatttttttagacggagtctcgctctgtcgcctaggctggaatacaatggcacaatattggtgcaccacaacctccgccttctggattcaagcgattctcctgtctcagcctcctgagtagctaggattacaggtgtgtgccaccatgttcaactaatttatgtgtttttagtagagacggagtttcaccatgttgctcaggctgatctcgaactcctgacttcaagtgatctgcccgccgtggcctcccaaagtgctggaattacaggcatgagccactgtgcccggcctatttccttgttttatatacttgcagttcctgtataggccctgccaccatttgattccatacagatctcgggcttgctcattgatttctataactaatcagtgtttttgattgtgtttggcaggaaattcttaaggccaccaggctaattgcagtaagtcattgcttctaaagcttgctttgtaaaaagctgggcttaattgccgttgaagtcagttctgttctctaaactgacagttttcccatcttatttagaaaatcaaagtaatcacagaaatttaggatcacagttgagtgaatcctgtactaccagcttaattctgatttgtgtgcattaagatcttgcttgcatagtttaaggttttttcttgaggggggagtgttggtgtgtaaatagtgtcccaagtgcttggctctaaaatattcatgtttggaatgtatacagagaatcaagaggttccttaaaagttataataatttaaaattctgcttacaacttaaaaacttaacaatgatgataaatctggtaatttttagattttattatattatgtgttgtacagaatcacatcaccaaaattgacaatacagactcagaattatgttagaaatattttgaaataacattgcattaaccttgtgtggtagaaagcctcctttctcccactagcatttggagacaattttgtggcaatatgtggtggtcaaattttattttttatttattttttttggggggggggacagtctcactctgtcacctaggctggagtacagtaacatgatcttgtctcactgcaatttctgcttgctgggttcaagtgattctcatgcctcagcctctcaagtagctgggattacaagtgtgtgccaccacacccagctaagtttttgtaattttaatagagccagggtttaagtaactaccattgtgaatgcaacttaaagctccaattgtatttacagttaccattttatgaaatggacaaaacatttagctcttatgtttgtggagccttctgcatattatacaagttaatatgtttcttaaattcttatgattaaatgttgatgctgtgaaaatgaatggtattcaaaacttgtaaaaagtgcagggtaaagaagtggtggaattttttcgaaacagagtctttgctctgttgcccaggctggagtgcagtggcttgatctcagctcactgcagcctctgcctcccaggttcaacggattctcctgcctcagcctcctgagtagctgggattacaggcaagcgccaccatgctcgactaattcttgtatttgtaatagagacagggttcaccatgttggccaggctggtctcgaactcctgatctcaggtgatctgcccacctcagcctcccaaagtgctgggattataggcatgagccactgcacccagcttattttcattttatgtgtagacagacttaatgccaaatttaatgatttgcccgtggacatgctagacattgtctttaaggttcacttcaagttaccaattccacttaggcctccatatctgatgaatatgcttaccagtatgttaatttttaggaaaaaaacctaaacctattttgggttttttaaaatagccttttactgaaattgctttctttagatcagtgtgggatcacagtcattcatcactttgttttgtttctaaataaaaataaaactcraatgcaaagaatattattggaatgcaaaaatgtaataattataacagattaaaatgttggtgtttgctgttttcccctggtacaacaatccttttttagccaataaaaaaataaatctaaacatcattctgattttctgaatgtcacttccatttctagactatttccagttacaataaatgaaaatagagttttattatatttactcctttcatcaattctattcagaaactaaatttgtctcatctagttgcagaatgtaaataatttagaaagactaagcatattttatattatcttcttgattgtatgaatgagaaaataattacatggatagtataaattgttgtcctatttcttcctaccatcttaatctgtttttttgtttgtttttttttaaactgctgctcatggagcagggctaccctgtaggcagtgtgcccagagtagccccatccgaatctttatgtataattacgttttggaaagatagacattttattgctttagtttaaatgatagtctggattctagacgtctgaattaaccacagctaatcaaatgatgaaattttgtatacggagacttaattaccccttgcttttaattatgtgaaatcttttaatatgtttcctttttttwaaaaaagtatttatttatatttatatgtactcagacacacacacacctacatagagagcttaagagattaatctatcgtgtccttaataaatcaggtagactatctttataatatctcttactttttaatgcatattctcatttttactttacttgagagcccagagaagatgatgattccaatctctgaatgtaatagtcattgacctaatggaggaaatcttatcttgcaaattagataatttttcctaaattatgtacattaaaatcaagtatattgttatatttggaaggctaagcattttccagaataaatcagggaaactcatttacttgtgaaagtttaaataatgtatttaccttaagatatttttgtctttactggtgaaaaggatttggtattgatttaatttcctgtgctcctgattgtatatatttcaagcatttgtggaaataagagtttgcagtcagttagatcaaattgcattagtatatttaaaattgtatttgatacattgatgtagaagtttttaatcttgcttcatactggttgttctgttttgttgtttttaattaggaaaaggcaaactgtacctacaagctaatccagcctgcttcttgtttttatcttttcctttttaatttttttagagacaggatctccctctgtcacccagggtggagtacagtgactacagtgatcatacctcactgtagctttgaacttctgggcataagggatcctcccacctcagcctcctgagtagctaggattagaggtacaagccactgtgtccagttacttttagatttttaaacagttgaaaaaaactcaaaaagaagaatatgtcataacacctaaacattctatgaaattcaaatttcatagaatgctaatatagaaacatttattggaacatagccatgctcattcatttatgtatttttatggtatttttttagctacttttctgctgtaacagcagggttgagtagttgtgacaactggtatggcccataaagcctaatatattaactttctggccatttacaaaaaatgtttgctagcccttattataattcatgaaaatacatggaagccttcagcggtaccttcatttagttaactgcaggtggtatagacagctttgctttttgagcacccctgtagcaactttcaaactttatatatttcttgtcccagcaaatccttattagcaaaatggattcttktataagttaaaaagatgtggtgtggtaaaaattaatgtcactcttgtggacttaacattcacgttttaaaactgttgccagcaatctcagggatctaagaacaagcaactatttgtagttttgctaaaccatgaatttatgactggcgaaactggtatggcaaaacatgttcaatcacctaatctgatgttcaggatacaaaataattgcttttatggtaactcttatactatcaaagatggtttttatggagaaatttatgtcatggaatggaatttaagaaagcacactggatgttaccacaaaggtcaagggttttatagcagaggggaaaatcattccattaataagccacacatatcagtatcaatttgaaagtgagcattcagtcattatctatcagaaattgtccaaaggaggagaaactgctgcagttttgtgatatttcttttatcctaaaatgaaagtgctactctagacatcagttgagacttttgagcaaatctgttacgttattaagccagtcttctctgtcacttagaaactaaccaccctttgttggttttttgtcagcagtcaaatgagactatgtgtgacataaataatatatttcttgaactggcaaggagcactctaccttattatcttaggaaatgagttgtgtatatttttaacattttcataatactggtgtcattaaacctaactaggcatatctgaatattttagtgttctgagcttatgttttatattacctagatggttatttttttctttcgaattaagtagaaagtacataatcacctaaaattatgttagtacagtagtcttactgtcaaaatacacattccagcctgattttaaccttttctttgagagtctcactctgccacccagactggagtgcagtggcacaatctaggctcactgcaacttctgcctcccaggttcaagggattctcctgcctcagcctcccgagtagctgggattatagatgcgcaccactacacctaaatacattttttttgtattttttagtagagatgaggtttggtttcaccatgttgrtcaggctggtcttgaactcatgacctcaggtgatccacccacctcggcttcccaaagtgctgggattacaggcatgagccaccacacccggcctgatttcagccttttactccatcatgtccttctctctctctttttttttttttttttttttttgaaacagggttgtgctttgtcgcccaggctgaagtacagtggcacgattatagcttactgctgccttgaattcctgggctcaagtgatcctcccatctcagcctcccgagtagttgggactacaggtgcgcaccccaccatgcctggctgatatttaaattttttgtagcaatggcatctcgccatgttgctcaggctggtctcgaactcctggactcaagggatcctcccaccttggcctcctgaagtgctgggattataggtgtgagccaccgcacccggccccattatcccctcctgtacacgtgaaaaaatacctttattttgatcatccaagcagtcattcagcacagtgttaacctagaaaaaaacagcatttgggtatttgtagatcatgactaaggtacatcaccaaagtgaggtttcttctcttttacactttctgattataagattgcatgagtttgccaccctaagtctcctctctttgatgagtatttgactatttctatatgtggaatgtcacataaccagtgttagaagtttatagaaaggtatcttccacccgttgttctttgcttttgagtcagcctcagtttataagataatgttgccttttaccccttacatataaagaaatgtgtcaaattttaaaagrcaataatagtaaactttcatttcttttgattgtgctaatgagagagagtgtatgtggagggaagggggggtgggggagaagaacctgagccctggaagtcacagaactaagttcagataacagctctgtcacttcctgcttgtaaccatgaacctctctgaacatactgtgtatatcagctcacaaagttgttacaattgatactgtatggaaagtacccagcatagtgtctgccatagtaaatgcacctttaggttagctttttttttttttttggagatgcagtctcgctcttgctgcccgggctggagtgcaatggcgccatctcagctcactgcatcctctacctcccgggttcaagtgattctccagcctcagcctccccagtagctgggattcacaagcgtgtgtcactacacctggctaatttttgtatttttagtagagacggggtttcaccatgttggccaggtcgaacccctaatctcaggtgatccacctgcctcggcctcccaaagtgctgggattataggtgtgagccaccgcgcctggccttatggtagctatttttgtgtatcagtacattaaggtgtctcactaatgttcaattagagttcatgtctatctttgcaagaggaggaacaacacacaagtgactgatgtacccccaaacctcatttaagatgttttttgaactttttctgtgttctgtatacatttctaataaagcagatgcttagtgaactgatttttttccatttgtcgtttgctggaggttataactagtagctcaaataggatacagtttacataggaggagaggttcatagagggtcctgtctcttcaattagcttaggtgacttgtttttgaaaaattaataggtattagttattcaagataagaactatatataggtaactacttatagttactgtctttaaagtgtgaaatgtgaagactgtgccattaagtggatttttttctttttttttcgagacagagtctcgctctgtctctaggctggagtgcagtggtgcaatctcggctcactgcaacctctgcctcctgggttcaagcgattctcctgcctcagcctccctggtagctgggattacaggcgcccaccaccacacccagctaggttttgtatttttagtagagatggggtttcaccatgttggccaggatggtctcgaactcctgacctcgtgatccacccacctcggcctcccaaagtgctgggattataagtgtgagccatcgcacccggcccattaagtggatttttaatctcacacgagctcaaggcacagctgaagaccttttaaattctgtgaaagatagtggatattcatagctagtttttaattccagacccttaatttctcttatctgtaagtcagccttgttgacttctgtctaacatttagcacctttacaaaattattcaagtcagtaaatatatatataaaaaacctatttggctttgtttcaagatttgctcatttaacctttaataatcctctttaaaatgggaatgatgatgtaacagaaatccctgtaacttacaaagtactatatgtagacgagggggaggaattcaacaacaatgcctgtcataaatcaggcagtgcattgggatactttttgtgggttttaattaaccaggtagttcacatcattcagcactcaaatgtcataaatcagaattagatattttaagaaagctaatttttgtacataagaaaaaatcttattaaaacatttattaagatagaaaaagagggaaatattagtaactctgctttatagatgaggagattgagagaccagagtttgaacctacataaagtcattatcagtaaagggactcaatttaacagtttttaatggtatgctatttccgctagataattaatggtttattgttggaaaaatatttgtatattgtttaatgatcttggaaatagagcccattattttaacctgttgaaaaaatatttataaggctgggctcggaggctcatgcctgtaatcccattgggaggcggacgcaggcggatcaagaggtcaggagtttgagaccagcctgaccaacatggcgaaaccccgtctctactaaaaatacaaaaattagccgggcttggtggtgggcacctgtaatcccaggtactcaggaggctgaggcaggagaatctcttgaacccgggaggtggaggttgcagtgaaccgagattgcaccactgcactccggcctgggcgacagagtgagactccatctcaaaacaaaacaaaacaaaaaatatttataaataaatgttgaagaaatagattatatatcctagtagttataacttataaaatttaaacataggcaactggttttatagcccattattttaacctgttgaataaataagatataaataaatgagttataagttgtaaaattccaacacagtcaactggttttataaggtgtacttgtctgcacggtgttggcaatgcttctttaaaacagtttatagccaggcgtgatggctcatgcctgtaatccctgcactttgggaagccaaggtgggcagatcgcttgagtccaggagtttgagaccagcctggtcaacatggtgaaaccccgtctctactaaaaatacaaaaattagttgtgcatgktggtatgcgcctgtaatcccagctactcaggaagctgaggcaggagaatcgcttgaacttgggaggcgaagattccagtgagtcaagatcgtgcccagtacactacgggctgggagagtgagactgtgtctcagaaaaaaaaaaaaaaamcagcacagaaaaaacagtttataattccctatattatggaaaaggtatatggatggttatgtatggaagtttttgtttgtttgggttttttttttttttgcagataatttctttaytgaaactatcggtaagttttactatgaaattttacatacatgatggaaagtggaagacatataccaattatattccaggaaaaaatactttaatagtattgttatatagtgtattggctgattccagtggatcctcgtctctcactgctgacattatctccaatatttgaattatatggcagggttcatttctgtcttttaagcagtgcccactttcccacttctttttggtaggaaatgcagtttttatatattttgatccagcatgtgtacttttgactccacaccaaggtgcatctgtctcaatcattaatttttcactaggaattgacttcaaaacttccaaattagtttcagttttcagtgagcaaccattaaatcctatataaagatccaagtcaatcaaagcagctgctgcttctttggtaccatcaaatgaatgcaccactccctctacacaccgatctctatttcttttaattatgtccaaaaattcagcatgtgagtttcgacaatgaagaaacattggtaattttgtttgttctgacagttcwaactgtttttcacagtatttgagttgagtatctttgggacaaaagtgcagtcagtcaaaatcaagtccacattctcctactgccacaactttccctttattgttttcatcaagatttagcaactcctttaagtaaagatcagggttattmttttcaaatttaccacatcttgtaggatgacatccagctgtactgaaaaacatatgatttgtttgtgccaaatgcagtgcatctttactgtcttgtagatttccacctgtaatcataaactttttaacaccaatctcgacagctctccctgttacatcctgtaaatcatcttgatgcttttgaacccccctataaattcctctgaacatggtgtcagtcaagttgataacaatatcgataaacttgaaatgactcatgactgcagatgggggacctccctggcggaagtgctatgtaaggaagttttaaagtgagaaaaattttaaaagaacttgctgtcagagatatctgaaaatagtaatggttttccttgtaaaatagttttctatgggccagatgtggtggctcacgcctgtaataccaacactttgggaggttgaggcaggtggatcacctgaggtcaggagtttgagaccagcctaaccaatatgatgaaaccccatctctactaaaaatacaaaaattagccaggcatgatggcatgctcctgtaaccccagctactcaggaggctgagacaggagaattgcttgaacctgggaggtggaggttgcagtaagccgagatcgtgccattgcactccagcctgggcaacaagagcaaaactccgtctcaaaaaacaaaaacaaaaagtttcctatgttctgtttgttatcgactagactgtcagctggtgtgcattaagggggttagagtctgataggactttctaagtgtgtactgtattattgagggggtgcagagaaaagagattgctagaaagtttctttgcaaagtaaagaaagacatgttaatgcccatttctttctcccaaaatgacagattttgcctacttatttgtatgacagtttttcattctggtattttcttctgctgtaaagcagtacttctatgtattttccaaggaacataattaatttaaaggcccttactttggcctgttggctttcactatgtttaagtacatatcagatagaatatttaccacaatactattctaaaaatacagagtagtgccttaaaaagcagtatgagaaggaaacactttacctggatagactttggagaagagtgaagtatgacctacttgattaggggtccttttttattttttacacttcagctaccttttggcttttcaaagttgccaaattgttttttattcatcagatatagttcacttagtttagctcttttctattcacgggtttccatgatctgcctgtccacttttttttttttttttaagacggagtctcactgtcgcccaggctggagtgcagtggtgtgatctcggcccattgcaagtgccaccttccggttcacaccattctcctgcctcagcatcctcagtagctgggactacaggctcccaccaccacacccagctaatatgtttttgtatttttagtagagatggggtttcaccatgttagccaggatggtctcgatctcctgaccttgtgatccacccacctcagcctcccaaagtgctgggattacaggcgtgagccaccgcgcccggccctgcctgtccactttaaaaatagttgccatttgacagtgctggtttgttattcttctcagctactctagtgtccctgcagctgatctcaaatgcaggagcagcagaggtactttgagagagagagagagagaacagaatatcagagtccagtgggagaccagcaaattgtgggaaatcacgtgactgtatgattcacatctccaatgagagagaattggttgtttctatgtctagatccagcctgttatgagagtaataccatcaataatgtaattttaattgtctggatgctttggcgctagtttcaagaaataaaatttttagcagcaaaattactggtcagatgactgtgagtagaactgaatttgatgacatttaaatcaggacagaataaaagtagtttcaaagtctagaggttaagtattatgggaaggtcagtaagtcatctgtgtatgtatctattgtcattcaaatgttcacctcagttcttttgccaacacctttaaatgacctgatgttatttcatttgtatattgcttccaatagtgaatcccttaaaaagatgacttgaataaggctatactttaaaagttagaaaacacattaatttcaaattttgactttaggacattgttgtcaaaggtcaaatcttaccacagattaatttcttatgctcttttgttacacaattgccaatgaactataactcatgaatttgtgtttttgcatacatttagatcaaaggaattttattcagtccttagaacgtataggagggaaagtcggtaacattaatggtaggagagcgtaacatggacctttcttttaatctataattctaggacgacatagacagcctaaacccagttctcagggacaacccgcagcttcatgaggaagtgaaagtctgggtaaaggaacaaaaggttcaggagatttttatgcaaggtaactattttgaagttatgcattaaatttttttggatctaggcaacttatcatatttgtttttggttattcaattgtgtgcaatataaatagaaggcccagtccaatattttgagttatatacatccaggaaaataatagcagagtgataataattttgatagaaagttrataatttcacaagtgtattaactttatttgaactgaatgcctgtcatgaaattacagctacacaggtgttttgttgacagaaaactgcatattatggaattctttaggtgtgtctttcctggagaaggaagcattgtttgcagtagagggttgcccacagccacaattgatttcctttgaagaatgttcttcgtatctggtaaaagtggcctatttcagygcacctttttcagaaattactagtcttttgtttcctttgtttagtatgttacaacgtgtgaccttcaaaccagtggggtttgacgatttttagcaatttccatttctgtcagtaaaatcatgtattgtaaatacaagctttttggaaattgaatggaaagtgagacaatatggcatgaactgttgttgaatgtctttgtgaatggaattttgttgttaaattcccatatctatctcaaccgtcaacttccatgccattaagtrtcaagagagaatcccaaagctgtttgctttatatgggtatgtacagtagtggatcatctacatatttaattcttcctaggctaaatattctttaaacttttctgtggagaatttcaaacacatacaaaaacagaatatttcagtgaactttcattcacctctctcccagccccaacaactatcaaatcttggctgatcctgtgctatccatacccccttctatcaaatttcagacatcaccctattctatccatttttttgaacaaaacaatgctggaacattattctgaaaaaagtaattgtttttaaatttaaaatactaggtatttcaagttttcatttgtcttataaacgtcgaagattttaacaggtttgatttattttttaaaaatcaagggattcagaaaaggtccacacattgtgattatttggtacatccccattgttgctctttttttccctttccttgcaatttatttgttgaagaaaccaggcaaatttttaaaaaataatattttgtttctgcattgtatccttagaggagaaaagattaaggggcagtatagtccctattcattctatgcagaattgtgtgaggctgactctaagctatgttaagtagtgggaacaaaccagtgtaaactgtttgttaatgggaattgaaaactgatcatatttggagttactctataagcatgtcctatattatttagaaaaaataatatggagtcttattcttcaatagttagaaaagactgaagttcatataatggatatggctactaaacagtgtttacgcatcacctcccttaaattatagccagtcaacatcttcacttttctctagatgaaagtatttaatttacaggtcatatggaatactttctacagttcattgatttatatatatatatttaaagctggcaaaggattgttgaatctgttacaactgtagaagaaggaatatcagaaaaataaattcagtcccagatctttgacttaaaattttacctaatctgtcaacctctcactttcttgatttttgtaaaagggctaacaatacttaggagagagaattaaataagcacttgaaaattttgaaagcactttgtaaattattaaggtacagcagttttttcccttacagttctttgttaaagtatttgataccattttaatacctgtgaattaaagatcgttttcatctcagtatcctcttctgtagagtgacttgttttattaggcatatctgaatatctgcagataaatatgtttaatattttttattattttctaatggatatctatacaagaatatcctttgaaaaagtgagtttagcacaaaagtgtaccatatttcgttaaaaatttttagtgctatatgtatacattcacttagccaatctcttttttaagacttttagcaactttttctggctgtgatagcaaatcaaaatttatagttgtttatggtaaagttttggcaactagaagactcaaacaaacatcaagttgcaagttaatctttctgtttcaaccatgtagtcatctactgcaatcttactaagtagcttcataaccttactgcattctacactactataactttgcattttgaactgttctcttattaactcgtgatcctagaaaccttccttctctcttaaagtattttatttctattgaatcaggaagtatgtgggtctagtgcagtgtatatagtaacttcagaatgattcatttgaaaggatatttacttctaaaacatttttttgaaaactgatagttggatatattactattatacactagctcatgtttcttctaaaaggcagttattaaatgaagatgtctccatttaagatgtttctgtttcttgtgttttttttaaggtccttattccttaaatggatacagagtgagagtatatagacaagactctgccacccagtggtttactggcataattactcatcatgatctcttcacccgcaccatgatcgttatgaatgatcaggtaaatagttccactaatatttttatagagattttaaaagttcaaatcatccatgccccccaaaatacatcaacaatttgmtactaaataatttttatctctagggtttttagtcgtgtaattctagtaagtttaaatgtatctgatattacatagaggtcatttcaggtcatagggagacagcaatgctcaatttatttcaacactgataaaatcagttcctaaaatagaggcattaaactcttttaattgattagtcttttttaaatccttagatgagctaaaattttctttctcagagtttcagtttttctgtccctccagtaataaaaatatttccgaaatcatttcttttcatcagtgaaaacttaaacacacagtacatttcttctcacatcaaatgtcagtgttggtatgctcaattaagttttatggtgaatcttaaggattacaagtttcctatggagtttttgtttgttttttgttttttgttttttgagctggagtctcgctctgtcgcccaggctggagtgcagtggcatgatctcggctcactgtaagctccaccacctgggttcacaccattctcctgcctcagcctcccgagtagctgtgactacaggcgcccgccaccacgcccggctatttttttgtatttttagtagatacrgggtttcgccatgttagccaggatggtctcgatttcctgacctcgtgatctgcccacctcagcctcccaaagtgctgggattacagacgtgagccaccgcgcccggctcctatggagttttaagtacyagtctgaaagtcttgagatttcaaattttttttttaacttaatacaaaaaatactcatttttaaagctgttgtttatgtagaaaaaatagatatttataccttcctgcctgattgtattgtggagattatctgatagagcgcctttatacacaattcaaatactttggttaaaatgtagttaaaatgctaagtaagtgttactgtttcattgcatttgattttttccctaaaacagtgacaaacttttacctctcagaaaagcacaaaactgccttgaattgttaaaatagttttaaccacatttttaaaattattcatttgcacaatttttgtctttttctactccctaaagtctacctctgagttttattttacaactgctttttgaaaattactttctatttaaaaataaaaagtaatttaagaattgttggcatctgtattcttgattaatacccttgtttttcaagatgtacttgcagtaaatatatttgctttttaattcttggttagcagttgaaatggtgagtttcagaaggttaaaaaggtaattttgtcttaagtgaataaaacaaattattataacagcatcttataaattagggatcccaagctgatttctaaacatttctactgagtaaagaaattataccaaatatttgattagctcattctatttaatttttgtttttgttttgtatcatggattaggtactagaaccacagaatgtcgatccttctatggttcaaatgacctttctagatgatgttgttcactctttgttaaaaggygaaaatattggcattacatcacgacgcaggtctcgtgccaatcaaaacgtcaacrctgttcacgtatgtatgttattagggatgaatttctgtaaaatatttttccttaggctagtagaaaccargtagtaaacaattactgttaattggttatttttagagccattatacacgtgcccaagcaaatagtcccagaccagcaatgaactcccaagctgctgtaccaaaacagaatayacaccagcaacagcaacaaagaagtatccgtccmaataagaggaagggctcagatagcagtataccagatgaagagaagatgaaggaggaaaaatatgattatatatcacgaggaggtaggacccacttttttttttaagggaatgaaamcaaataaaacaaaaatacattttaaaatatgcttatttagtatgaaaaataagactcttctttctttaatcctacagaaaatcctaaaggtaaaaacaaacacttgatgaataaaagaaggaaacctgaggaggatgaaaagaaactaaatatgaaaagacttcgaactgacaatgtttcagacttttctgagagcagtgactcagaaaattcaaataagagaataatagataattcctcagamcagaagccagagaatgaattgaaaaataaaaatacttcaaaaataaatggagaagaaggaaaaccccataataatgagaaggcaggagaagagaccctaaaaaatagccagcctccctgggatcaaatacaggaagataaaaaacatgaagaagcagagaagcggaagtctgttgacactcagcttcaagaagatatgattattcatwcgtcagaacagtccacagtttctgatcataattctaatgatttacttcctcaggaatgcaatatggataaaacacataccatggaattgctaccaaaggagaagtttgtatccagaccacccacaccaaaatgtgttattgatattacaaatgacactaatttagaaaaggtggctcaggaaaactcaagtacctttggccttcagacacttcagaaaatggatcctaatgttagtgattcaaaacactctattgcaaatgcaaaattcttggaaacagcaaaaaaagattctgaccagagctgggtcagtgatgtagttaaagtggatctaacccaatcaagtgttacaaatgcttcttcaggaaatgatcacttgaacatggaaaaagagaagtatgtctcttacatttctcctttaagtgcagtttctgtcatggaagataagctgcataagcgaagtccacctccagagactataaaatctaaacttaatacttcagtagatactcacaagataaaatccagcccatcacctgaagttgttaaacccaaaataactcattctcctgattctgtaaagtctaaggccacttatgtgaacagccaagctactggtgaaagaagattggcaaataagatagaacatgagctatcaagatgcagttttcatccaattcctactcgaagcagtacattagaaactacaaagagtcctcttatcattgataaaaatgagcattttacagtttacagagatcctgcacttattgggtcagaaacaggagctaatcatatttcacctttcctaagccagcatccttttcctcttcactcctcatctcatagaacctgtttaaatccaggtacccatcatcctgccttaactcctgcaccccatttactagccggatcatctagtcaaactccattacctaccattaacactcatcctctgactagtggtccacaccatgctgttcatcaccctcatttacttcccactgtgttacctggagtgcctactgcctccttacttggtggccacccacgactagagagtgctcatgccagcagcttgagccacttagcgctagcacaccagcaacaacaacagttgttacagcaccagtcacctcatcttcttggacaagcccatccttctgcttcatataatcagcttggactttatccaattatttggcagtatccaaatggaacacatgcatactcaggactyggtttgccttcttctaagtgggttcacccagaaaatgcagttaatgctgaagcttcattaaggagggtaagttacactgtagtttgccacatagcagtatatattaatgaacatgtacaggtgctttttcaatattccatctattttttaggtcatttcctattataaaatatgttagaatttttcggttgtttttccatacacttagtaacctcaagagtgggagctgaaacgtcagaaaagcctacttataaaaagaattaatttaaagaagtaaaactttttagattgtaatatttatttattatagatttaaatttttggtatattttctttttctttttttttttttttgagatggagtctcattctgttgcttaggctagatgcagtgacatgatcttgggtcactgcaacctctgcctcccaggttcaagcaattcttctgcctcagcctcctgagtagctgggattacaggtgcctgccaccatgcctggcaaatttttgtatttttagtagagacggagttttaccatgttggtcaggctggtcttgaactcctgaccttgtgatccgtctgtctcggcctcccaaagtgctgggattacaggtgtgagccaccgcgcccggctaatttttggtataaaaattattacacaaaattatacataattataattatgcaataattataatatatataatacaaattatacataattattttgctcagccaaattcccagaagtgaaatttctaaaatttttataaaattgtaaggcttttgatatatattatcaaattgttcttaaaaacaaattgttatattctccagatgtatgtttgtatattaatggtatagtacagtgtttgactatttaacccccttgttcccttaagggtgctcaaggttacagattcccagtatttgagggtaaagctgcagctgagattttgtctgcctaacacagtattgctaaaggtagcggtataaggctcttgttcattcatgagccatgtagtttctatagcaaattcatttttacactaaaaaatggttattgagagcaatactagccccggtataaaaaatggaaaaattgatatcacttttaaactcccaggagacaaccttgtccttcgtacatcctaggatgctcatcaagtatcccctagaatctctttttaacaccttgtttttgtggttaaaaaacacatacatacataatattaaatgtgccatcttaaatatttttaagtgtacagttcagtagtgttaagtgtgttcacattgttgtgcagcaggtctctagaactttttcatcttgtaaaactgaaactatagccattaaacactaactccccttccctgccagcccttggcaaccacctttcttctgtttctatggttttcatgactttagatactttctatgagtagaatgatagaatatttatccttttgttactggcttatttagcttactacaatattcttgaggttcatccatgttgcaacatgtgacatgatcttcttcttatttaaggctgtataatattccactgtatgtatgtgccctattttctttctccattcatctgtcagtggacatttgggttgctttcacctcttggctgtggtgaataatgctacagtgaacatgggtggtttttttgtttttttgtggggttttttttttttttttttgagacagagtcttgctctgtcacccaagctagagtacagtggcgtgatctcggctcactgcaacctctgcctcacatgggtgtttttaacatcttaatgtcatcttttttgacagctttctgaagttaagtgagatcacagttgggggtggtgatttagaagacaattttagtgactttctgttttactcagggataatattttttacatataacattagtgatgccagtagataaaagcatnnnnnnnnnnnnnnnnnnnnnnnnnnnnnnnnnnnnnnnnnnnnnnnnnnnnnnnnnnnnnnnnnnnnnnnnnnnnnnnnnnnnnnnnnnnnnnnnnnnnnnnnnnnnncctggctaattttttgtatttttagtagaaacgaggtttcactatgctggccaggctggtctcgaactcctgacctcaagtgatccgcctgtctcggcctctcaaagtgctgggattacaggcatgagccaccatgcccaaccatgtgatgggtgaactttgatgataagaggcaccaagtggttgatgatgcatcttgcataaggtctaccagttttgaaagatgtttcctgtggtttattcctgttgcaaacatggactccttttggctctactttcatatgacctttggcctttaatgaagtctcaccagtgatccccacagttgattctgcaccagcatcaccacatttgaggttgacaagatctcagttccagaattatgctgccattgatcacaagctttccattaccattttggagggtgccgttgcttttgtcgtagatgggagtcatactggaacctgtgtgttacatagtcaaactcagtgaagaatcactaatcactatattatcctctttaccagaatagaaagcaggcctggtgacccaagtgccctactgtactcagattattaattcaaggtttctatttttattgttgcactcacatgtttattctgacccttcactctcaygtcattaatgtagctgcagctgcacaaagataagctagctagaggaacacaggagagccaagagctggctaacagatttgtgtctttttccttaacatccaaactcttgaaaacagatttaagtaacttaaaaatggcttggaagggagcaatactcagtatgtgtcacatgtatatggacttagaccatgactgtctagcctctgtgtttataagtacataaaatattttattaactggtcataaatgtgttaaactaaaaacaagtgtatcagatttttatttgttatataaaattacaacataaaggagtaaatttgaataacattttgaggaaaaataaaaatatcttaccccctactattgaccaaaagtgaagaaacaatacaagcataagacactattattgagaaataattttgaatggcattttatagagcaaaactttgttgtcattgccataattgattgctgtttaagatttctggatcttatagaactgaggccgtttgagacacatatttgatccttatgtgtatatttatgtatttttctcttatgtggggtttatggctatagtgtatgtttttaatttcatagcagtatatttttggtgtgacatactgcttttgcattattttgagaagtaaaacgtattccctttgttagagaaaatacaaaggaggttgtattttcctgctatttgactatcatcctattaacaaattcataaaacatgttctggaaggatgtcagtgagtcagaatatagaaaaatccttaagcatgtagtcagatagctgtatgtctcgatgaagaggttgctgtcaccttatattcagtcatgagacaggcagcatattgatgtataaaattaactttattagacttctacacctccaagcttaatggtgcaaccttgtttatagcttagagtgaaatggggagtgcatttgggttttgaaatgtaattatctgccaattgtcagtaaattgttacattggaaaagttaaattttttgatgacaaaaattgacaaatgaatttggttataatttctatttctgatgaaatgtgttttaggaataatattctgtttttactgttagcaatatacttttgctgttagaatcaggaaatcatataaactaggttctgtatatggcatttatagtaaatttaaggcactgatttcaagatctgtttttagtaagatgacaataaattatttaatactgattatgatatggaaaaatctgtttaattatgttattatttgtctgaatatttctcataagatgtatttagaaaaagttacaagtttcccaaagaaactgctatttgaatgaactaataaaccaccaagatcatacccagttctactgtgacacggtgtttagctttttctagtaactgaaatctaggtgttttttttgttttgttttgttaatagaattctcccagtccttggctacatcagcccacccctgtgacctcagcagatggtattggattacttagtcacattcctgtcagaccttccagtgcagagcctcatcggcctcttaaaattacagcccattccagtccaccattgacaaaaactttagtagatcatcataaggagtaagttcaccagtgcttaaaaattataaataccttgttcataatttttcttaatttgccttttaaatagttaattttaagttaacacatatcttaagattaggctttgttctgttttgatatttcttcaaatttattatagtattagagtacatgcaaagatgtcttttactttcataatagaatgatattgcatagaagctgtctttgtattttgcaggaaaaagtggttacagaaatatttgtgtattttctttacagagaattagaaagaaaagcttttatggaaccattacggtctgttgcatccacatcagccaaaaatgacctggatctaaataggtcacagactggaaaagattgtcacttacataggcattttgtggatccagtattaaatcagttacagaggccaccccaggagactggagagaggttaaacaaatacaaagaggaacaccgtcgaattcttcaagaaagtattgatgttgctccctttacaactaaaatcaagggacttgagggtgagagagagaattattccagagtggcatcatcatcttccagtcctaaaagccatatcatcaaacaagatatggatgtagaacgctcagtatcagatctttataaaatgaagcactcagtgcctcagagtttaccccaaagtaactatttcactacattgtctaatagtgtggtcaatgaaccaccaagatcatacccatccaaagaagtttcaaatatttacggtgataaacagagtaatgcccttgcagcggcagcagctaatcctcaaactctgacttcatttataacatctctttcaaagcctccacctttgattaaacaccaaccagaaagtgaaggtttagtaggcaagataccagaacatcttccacatcagattgcatctcactcagtaacaaccttcagaaatgattgtaggagtcctacccatttgacagtttcttctacaaatacactccgcagtatgcctgcattacatagagcaccagtatttcacccaccaatccatcacagcctggaaagaaaggaaggcagctatagtagtctttcccctccaactttaactccggtgatgccagtaaatgctggtggtaaagttcaagaatcacagaagcctccaactctaatacccgaaccaaaagactcccaggcaaattttaagagttcttcagaacagagtttgacggagatgtggagacctaataataacctcagcaaagagaaaactgaatggcatgtggagaaaagcagcggaaagttacaggctgctatggcatctgtcattgtgcgtccatcttctagtacaaaaactgatagtatgccagcaatgcagttagcttctaaagatcgwgttagtgaaagatcttcagctggggcacataaaacagattgcctcaaactagcagaagccggagaaactggaagaatcattttgccaaatgtgaattcagacagtgttcacacaaaatctgaaaaaaactttcaggctgtctcacagggcagtgttcccagttcagtcatgtctgctgtaaatacgatgtgtaataccaaaacggatgtaatcacatctgctgccgatactaccagtgtttccagctggggtggttcagaagtaatttcctctttatcaaataccattttggcctctacatcatcagaatgtgtatcttcaaaaagtgtcagtcagccagtggctcaaaaacaagaatgcaaggtcagcaccacagcaccagttacattagccagtagtaagacaggaagtgttgttcaacccagttctgggttctcaggcacaactgattttatccatttaaaaaagcacaaggcagcattggctgcagctcagtataaaagtagtaatgccagtgagactgaacctaatgctataaaaaatcagacactttcagcctcccttcctctggatagcactgtaatctgtagtacaattaacaaagcaaactctgtaggaaatgggcaagcttcccagacaagtcaaccaaactaccatactaaactgaaaaaggcctggctcaccagacactcagaagaagataaaaatactaataaaatggaaaattcagggaattctgtatcagaaattattaagccatgttctgtcaacttaatagcctctacatctagtgatatacaaaatagtgtagatagtaagatcatagttgataaatatgtaaaagatgataaagtcaacaggagaaaagccaaaagaacttatgaatctggctctgaaagtggagactcagatgaaagtgaaagcaagtcagagcaaaggactaaaagacaacctaagccaacttacaaaaagaagcaaaatgatttgcaaaagagaaaaggtgaaatagaagaagatttgaaacccaatggagttctcagcaggagtgccaaagaaagaagtaaactgaagttgcaaagcaacagtaatagtaagtcagttactttgttttatctcaggtaaaatgggctgaatgttttagctatactagtgtgctgctttaaagatcagtgagcttaaaggcatcctttgtcttcatttgcgtgccttagctttatgtatatgctcattgatctcatttctacatttcacaagtaagtaccctttaagaggaaatgagagaacacttattcctctatttttaaaagacttgtagaaatatatatcttacctgacagtcattgtaggtaatttgcgtaatttaacgtggaatttagtagttactcgtaattttggccatttctaagaattgtcaaaatgcagttatggctgtcacaccaaaagtggatttgtaatatcagctaagatatttacctctaacaagatgtagtcaggaaagaaattctgctcacatacacatattttgaggcaaatttctagaagatagttacagttgtccctgggtatacctgtgggggattggttccaggacgcccccacggataccaaaattcacagatgtgcacatcccttatataaaatagcatagtacagtcatgtgctgcataacaacttttcagtcagtgacagaatgcacagctgggcacagtggctcactcctgtaatcccagcactttgggaagctgaggcaggaggatcacttgagctggcgtggttgaagctgcagtgagccatgattgcaccaccgcactccagcctgggcaacagagcaagaccatgtctcaaaaaataaacaaaaaatgatggaatgtatatatgacagtggtctcatataagatcgtaagactgtgtttttactatacctctttctttgttcagatacgtaaatactttgtgttacaattatctacagtataaagtacagtaaatactgtacgggtttgtaagctaggtttgtgtaagtacatgctatgaagttcctacagtgaggaaattgcctaatagtgtatgactatatttgcatgtaacctacacacatcctcccatatactttaaatcatttctagattccttataatgcccaacacaacgcttacacatcacttcatttatgcaggattgaacatagtactctgcacatggcaaattaaagttttgtttttttggaactttgtagaatattttttcccccaagtatttttgatccatggtaggttgaacccatgggtttggaacccacggttatggagggccaattttacttcagagtaatatgaatgtggactgtatttcactcttatatcatctggtgacaaaattggaagcttatggaaattactatctatttaatgctgctcattcaaacagtccttaacaataggtaaaaattaacataaggggaggcttgtggttttgtgtattcatttcgatgttaaagaattgccatattaatagcttcacaactgattatatatcctttgtggcaacagctggacaaaataagagatacttaacagtaatattcactataaagtgtttctatatcattttactctagtagtagtttttctcagtttgcttatttctttttaggtatgttgcacaatgcagaaagcacttagtttcactatgtccgtgtgttcatccacatacaatatatgaaatatctgtgacaatgtggacactcaaagtactttcacaagcacttggatgcttgaaggctcccatttgtgccttttaactgaatgaggttttcccacatgcctgtgtggaaaccagaggcaaagtgaaggagaggaaaacaggaggatggaatcatagaaaaggacagtcagaaagtgaaagaacaaaggacaaactcaactagagccagagactgacagactgaaatgcaagcatagtcagaagacagagagggggattaacatcgaaggatacctgccatttacttgaatattggattatatacagtgttgctttttcttatgtgttccccttactctccctcactacccccatgaattcataataggcttagtgtgagcaatttaattgtttctcttctgtcttatatgacatttcctttggtgttgggtgttcagatacttgagtaaaacttaaaaaacaaaaacaaaagataggtaccttccaggttttaatgcctagaaaactcttgtgaagttaaatttatgaaattaagtgttagtgaaatacgtattctcttttcatcttgagacraatatacatattcacatgtaagagttctaagaaaagggccagaatgagtgcctttttttcccccaggttgtaatgtttagtcaaatctcccctgcttggtaactagcatgtagctttagagaggctgttttatgacccatttgttcaccaagtccaaagtaatattaagtcaatattagatgtcatctattaattgtggacagagttgacttgcttttgttctaggctacctagaaaagttttttttttcttaaatattttttagagacagtctccctacattgcccagactggagtgcagtggatattcacaggtgtaaccatagtgcacagcagcctccaactcctgggctcaggcaatcctcctgcctcagtctcctgagcacagaaaagttctttaagttgggagttttcataagtcagggaacttctaaatattaatggattatctacttcatggattaaataatgtctattttctttctattgtttagtagaattgtcatcagtcatggtcaatcaaaaagaatgagttaggcttacacctaaactatgtaatatgattacatacaccgttatacatgtataattatatattttatatacacatacacataatagtgtgtttcttagtacattaaagctagatataatagattttgtcttatctactcttttggaatgtcttcctctctgctrcctttttgtttctcttaattaaaagtcagccgctttttctccactaatttttatgttttatttacttctatcttacattttatctaatttttacatttaattttatgatctgaaattgccactatattcaaatatataaattctacaatacaaaaccagtggtttatgatcacagttaatttctctatctccaaaaaaatattttttaagggggtggcatatcagagattaatgtttggcaagtatttgtctcttactttcttcctccccagttttctgttagagcagctatttgtggatttgctactagagaactaaggttcttactataaatgaagaagtatccattgagttaggtatttttttgttgactaagtgtcttaatctcaaacttctaggttttatatattgccagtaaattatatatatatggaattgaaggatgaagttttatttattgtacaaatactatgacagttaaattcataaaaggagttagttgcagtcatgtgtggccttgtctagaagcaaaaattataatatcaaaagctctacgtatgaattgggccttaatgtctttgtactcatttattcttttattgaaaaaaagctctaaatgcctattttgtgtcacataattgagatttgctttgaaatgtctgattctttactatagtactatctgagttgttcacagtggtatggtgatccatactctgaactgttccattatctggaattaaaggcatataataaaaagaaatagactgtatttagtttattctagtgtaataaattgaaaagtaaatagatgattagaagcaagtgttccaaataaaaatttatcagcagtataacaattctatcattcattccaacttgtaaaagctctgaatattttacacagttcataggaaaaatctcttttgcacaatggaggaaataaacattttacataagtcttctggaaatgggtttataccataaccgggagatgtggtgtgtggttatacacatgggtgtttctctagtggattaagccaaatggctccttaccctaagttagagacagagaggggaaagcatgtaattgtaaagaacgaggcagcaattcagaagtgcttaataattggacctgatttcaaatgggtcactctatatggtttatttaaacacagtgctttgtaagtttctgcaagaagtacgtagtctcaggagaatagctgtacctctgatccacacattgggcatgattagaaaacacaagggtaggaaatacagttttattctttcagcatgacagaaatagcaaactatgtaaatctaatatctgacatatagatacattaatatgggtgcaataagacacttacaagttagagccaacaactaattgctgatcctaacatagcttgcttttatttatatatatttttagacagagtcttactccgtcacccaggctggaatccagtggcacgatctcaccccactgcaacttccgccccctgggatcaagcagttcttgtgcctcagcctcccgagtagctggaattacaggtgcgtgctaccgcgcctggctaatttttgtatttttggtagagacagggtttcacctattggccagactggtcttgaactcctggcctcaagtgatccacccacctcagcctcctaaagttctgggataggcatgagccactgcacctggaccccaacatagcttgcttttttttttctttcctcttttgttttttttttggacggagtcttgctctgtcaccaggctagagtgcagtggcgcaatgttggctcactgcaacatctgcttcccaggttcaagtgattctcctgcctcagcctcccgagtagctgggactacaggtatgcgccaccatgccaggctaattttttgtattttagtagagacgggatttcaccatgttggtcaggctggtctcgaactcccgacctcaggtgatccgcccgcctcagcctcccaaagtactgggattacaggcatgagccaccgtgccyggccagcttacttttaaataaatatgtttttaaaaattttaatagacaacatttaatttttggagttcctctcggtccagaaattcttcttactctctagatgacggatttcttgagccaatgttcttgtacttattaaacatragtcagtaaatgtgatggagcaatgatgtagagtatgtaaataagttgatttttttttcacatattagactgtataatgcattagagttttgtcctttttacttttttgatggctattttaattcatcaataaagatagccaagttaatttttttttccttttactttcttcaaacccttttatttttctaaaagatactgccaccatcagtatgttgatatcaaatgcagggtattataataaaggaaagatgttaggagaaatagctaagcacctcttctcccaaatacaggttttataaaattaccacttgtcttaatgagccacacttaccttggaaaatcagattatgtatttcaatagaaataygttgaaactaacctgtagtttctaactatataaacctttaatctttacgttcttgctgtggatcttgaaagagctttctcctatgtaaaccaacttttggtatagaaggactgtattttcagttattgatatacacagaatatgaatgattcttatgtttgctattatacatacatgaataatatttaaagagttcagtcagctggaaaatttagttctgcattttcagtacactgacataagagtggttcatttggttaatagaattggttagtaagtaaatagaaacgctgctgcactttttagtcattaatcagtacctagagctcttaatgtctttgcttctttactaaagtcttacygtatcatcacaattgtataactgacttgaatttcatctcaaggagtttaactttttacaaagcataatcttgctaaaactttcctactgattttacagctggcattcctcgttcagtattgaaagattggcgtaaagtcaagaagctgaagcaaactggggaatcctttttacaggatgactcctgctgtgagatagggcctaatttacaaaagtgtcgagaatgtagacttattcgcagtaaaaaaggagaagaaccagctcactcaccagtattttgtagattttactactttagacggtaagtgaaaatatkagattgggaaaaaagtaatttattgatttgatattggaaattatatagtgttattctgagtgtcccttttggatgggggagtaagtctttgagtctccatgttttggaaacattataaaagagttattaaatgttttcgtgctaaattttaacaatttctaactataagactaaatacatacattattactcatgttccatatgacctttctgttctgagagatttattcttaatgagaaaatgatttttttcttaacagttgttaacctatatactaacttaatatgaatattaccaaataatattttaaaattaaaaacttaaaggtagacttgcaagagttcaactaaagaatagctggataacccagacagtaaagactaattaacatgtcacactccagaatcagtcatttctagttgtgaattccatctctgtcccttagttcctgtgtgagtttattaactgtggtaggacaactaagcctgtctcagctgcaaaatgtaaatgttagtacctacctaagagaggtttaatgaaggttaaatgagataagtatgccaagtccttaagtgtagtcccatgcgcatatgaaatgctctattgttagctgtaattatcttcctaagaaattgagacactttactctgctgaatactctatgctggtagcccagtatagacctccaaaaatacgtgttgataagaatggaccaggttctctttcttcctcactttgtagccaacaatccctaaaagacaagacaatttcagggaataattataagaggtagtacccatggaagtgcagaagagatgaaaaaaggaatcaaaaggaaagtaggtttgaggcataagaaaatctaggaaaagtctgaaggaaagaaatgttcaggcaaagattataacataaaaccaaaataagatgctgggttatgacaaaaaggagaaatttggtttaaaaagaaggaagctttggaaagaataataaaggtatgaaaagtagggataaaagaaatgttgctgttcatatgaaaaatacagtatgacttgtatcttagacatcagctatttgagagtaaagagagtgaagtacaatataattgaggaataaccaccagccagtaagagaatggcaattttgccttccgtttaccataaacttctctgaatagagtwgttatttggatatcagaagctaagagcaagtaagcacattaatggggttcytataaaactattaagaattttcatccttgttctcttaaatcacttcagcaatgtgtcagtctaattaatgaaaatatatgtatagttggcatttttaaagtcctcctggtgaaagtcttaaggccatttcagctttggtgattccgatttagattatgtataaaataacagcattgctctgggcaacattgggcccacatttttactcttgtcattcatcaaacacttaaacagttttcattttattggagttaagtaagtataagtgatcttatttcttgaaataacctaaaattactactacttattgccatttgcataacacctgagttatttaaattaattcaataattagtgtgtgaagaattaacctgttttcctgtttttaatgtaattcatattttataatgcaatgtaaacataattataaatttacaattttaaagactggacttatgttttaatatgtgggtacctaatacttttatgttttaatatttcaggttgtcatttagtaaaaacggagtagttagaatagatggtttctcttctcctgaccaatatgatgatgaagctatgagtttgtggacacatgaaaattttgaagatgatgaactagatatagagacttctaaatatatcttggatataataggtgataagttctgtcaattagtaacatctgaaaaaacagctttgtcctgggtgaaaaaggatggtaaggaagttaaatataacatgaactgcacaaatttcattttaagaatttctctttgaattatgtttgtgaaagaagtccctaatcttatctaaccttgatttttaattatgataatgatacctttttacagtatgtatttaaggttacagatactttcctatagagggtgaattgagtcaattaaccatttgtgaaatcacaatagcattttgctgtttctgccattacaacattaagttaatgtgttaaayccactttagaaattgtgaaatttcagcatttggcttataaagacataatctaccccaattatttgtattggaatctcagctttactccctaactgttacctttggcaaataacctctctggatatcaggcaggtctggaaaataggaaagataactatctcattaatttgtttagaaagtagttatgttaattatgtttacttaagtacttaatagttcctaacatagtagatgctctaaatattagcttcttttccttcccttccttgaaatcactggtttgcccctcaggggacacttagcaatgactggagacatctttggttgcataactgagggagttaaggatatgttgccaacatctgataggtagaggctacagatgcctctgaacagtctgcaatgcacagagtaatccctcccaacaragaattattcaacctaaaatgtcaaaagtaccagagttgagaaaccctgcttagatgtacggcatttttatttttcacttaatgatcatttatgggtcttctaaagagaattacaaattacttcaagaaagctattggtcttcagttaatatagccttgaaagttcttggtttgcctttacatttttatttcttctgtatttcagccaaaattgccttggaaaagagcatgtttgcctttaaaatttttgttttttctgtatttcagccaaaattgcctggaaaagagcagtgagaggagtccgggagatgtgtgatgcatgtgaagcaacattgtttaacattcactgggtctgccaaaaatgtggatttgtggtctgcttagattgttacaaggcaaaggaaaggaagagttctagaggttggtgtataagtttatataaattgaagttttttataatttttctttaggatcactcttctagaacatgagatgtgtttttttattcctactttccttattaatgtattaagtattttttttcagtttgtttttaagaggagaagtaaccacagtttattaacggctatattttctagaattaaattgcatctacacccatcagcctcatgagtatatccatcttctcatttcagtcagatagttccttaatgtagcccaaatttaggttaggccttgttgctttaagattccagtgtgtgggccgggcactgtggctcatgcctgtaatctcagcactttgggaggccaaggctggcttccaaagattgcttgaacccaggtgttcaagaccagcctgggcaacatggcaaaacccccatctctacaaaaaaaaaatacaaaaaatgagctgcgcatggtggtgtgttcctgtagtcccaattacctgggaggctgaggtgggaggatcacctgaacccaggagatggaggctgcagtgaactgtgattgcccyattgcactccagcctgggtgacacagtgataccctgtctcagaaaggaagtaattaaatgaatcaaaagtgttttagaaagattatccaaggcaattttggaagtgactacctaaagctggtattgaattttttgttaggagtagagttctgatgaaataagaggattaataytgtggaaacattagaagtacttagtatagattgtctgtctcaaagtaatgagtgtcattttcatttcaggccgctcttttttcagagtagtgtatcaggtagatgaaccatgatttaaccatcagtatcttctactgataggattaaccaaagtctcttaccctttcttaccaaagaaacctgagcaaatgtggaagcatagctgaacatctacagctaagtgtttctgggatatgcaataaatatgttaatatgagtaaaatgtgaaaccacaatacatgtattttgatattttcaattgttataaaatttgatgtaagctaccataaatgctttttttgaataagataaagaatatttatattaaaagtaaattgttgtattgttgatgattttctttctctttttctttttcttttttttttggatgttgttgttgagacggagtttcactcttgttgcccaggctggagtgcagtggcgcaatcttggcctcctggattcaagtaattctcctgcctcagcctcccgagtagctgggattacaggcatgtgccaccatgcctaattttgtatttttagcagagacacggttttaccaagttggccaggctggtctcaaactcctgacctcagcctcccaaaatgctgggattacaggcatgagccaccacgcccagcctgctgattttcatagtagtattaattttgaaagtatagtcttgttaccgtatcattcttttttctttttttgagacagagtctcactctgttgcccaggctggagtgcagtggcgcaatctcggctcactgcaacctccatctcctgggttcacaccattctcctgcctagtctctccgagtagctgggactacaggcgcctgccaccaagcccagctaatttttttgtatttttagtagggacgggttttcaccgtggtctcgatctcctgacctcgtgatcggcccacctcagcctcccaaagtgctgggattacaagcgtgagccaccatgcctggccactgtatcattcttttaagtgtaacttatgccttgggttattgtccatactatctatatatctattttactgttaaatattataataaaactcagattgagtaggtttaatatatagcttcatggagtggtaatccacataagtgtctaaaatataagcaatatatgaaatatttgcaagttaccgtgtaggttttgcagaggaaagtcaaagcttttaaaggtaactagttttagactgggtttgaattttatttaatgtatatttttatgaaacaatagttctagattttttttttttttttttgagatggtgtcttgctctatcacccaggctggagtgcaatggcgcgatctcggcttgctgcaacctscacctcctggagttcaagtgattctcctgcctcagcctcccaagtagctgggactacaggcatgtgtcaccacacctggctaaatttttatttttagtaaaaatggggtttcaccatgttggccaggctggtcttgaagtcctgacctcaagtgatccgctgccttggcctcccaaaatgctgggattacaggtgtgagccactgtgcctggtctagttctagatttttttatgctgaatttattgaactttgtgacactgaaactcttgtagccacgtcgtaagtagctgtctgtgtcactaaatttgtagagaaggttcttgagatcaaggtatcaaatgcttttattctttatgttatgccctatgctatgccttaattctttacaacttcagggatgaaaccttatttgaagtcagcaatagcagttaatagtaactgtatggtaccagctttttcacatgtctcatgtttctctacatgtctttgaagcataagaggaaaatgaattaacagtcatctcaaactgtgtcagtctgatgtactaggatcaggcataaattctgtttggcacagaaaacagctaagagatagaagattagctacaaagatagaggtcactaataataatgactggtaatttttagaaaggctatcattatatccattttgtgtcagtgtttttataaaatcaggaaatggtggaactgtttttcctgacttgtttcagaaccaaacatctaaagcatatcattgacattttatttcattatttttatttttttctttttctctttggctgtgactctagccaactatgaaacattttatataatcgttaagttctttacactatcaatttataattatgaaaccatgagtgtgatatacaagttttattatcttacagataaagaactatatgcttggatgaagtgtgtgaagggacagcctcatgatcacaaacatttaatgccaacccaaatnnnnnnnnnnnnnnnnnnnngaaacacttaaaggagtatctagaaatataacagggtggagagagatttaactagttttgaattgtcttgctcagttattggaaatcctctatgtaataasgctcagaagataagtccaagcctcagtgatgaagaaagttcaccattagaagtggaaagctggagtgtaatgaaaaggcctattggatttttaatgaaagcttcttataatttttgagcatatctaatttttaataaagagagaaaagaatagagaacataaatttggctgggcgcagtggctcacgcctgtaatcccagcattttgggaggccaaggccggcggatcacgaggtcaggagatcgagaccatcctggctaacacagtgaaaccccgtttctactaaaaatacaaaaaattagccgggcgtggtggcaggtgcctgtagtcccagctacttgggaggctgaggcaggagaatggcatgaacctggggggcggagcttgcagtgagcccagatggcgccactgcactccagcctgggtgacagagcaagactccgtctcaaaaaaaaacaaaaaaacaaaaaaaacataaatttggttgaataatcaaaactgtaatagatggaagagaatggagaaaaatggaagaaatttaaagggcacaagaaaacctccrttattcccaattataatataaaatattgtaagaaaaaaaktttacagcattaacaactagtggtaatctttttattaactaccattttattttgtagttttgacagatcttctagatgccatgcacactcttagggaaaaatatggtattaaatcccattgtcattgtactaacaaacagaatttacaagttggaaattttcctacaatgaatggtgtatctcaagtgagtaaaaatctctggttattcaaataaaatctgtggttaaattagtcaactttgatatttatttgaaatttggtttargacttatgtatgaaytaggtttgctgtgtttctgtgtaaattttttgtatctatactactaattgaattattgaagaaagtgtttaaaaatgtaattgttctacctttgtaggttttacagaatgttcttaatcacagtaataaaatttctctgtgcatgcctgagtctcagcagcaaaatactcctccraagtctgagaaaaatggtggcagcagcccagagagtgatgtaggcacagataacaagttaactcctccagaatcccagtcaccactgcactggttagcagatcttgcagagcaaaaagccagagaggaaaaaaaaggtaaacataattgattatctaggcatgtgtgagaggagtatagtataactaaccaacaatgtactattgtacaataaagtactgttaatattgaggtaaacaatttactttggtctttttcttgaattatgggttaggttcaatgtaaaacattttgtcttcacttattaggaactagcctgttgtttttttgttgtttttgtttttgtttttttgagactatcacccaggctggagtgcagtggcacaatcgttgctcactgcagccttgacctctcaggcccaggcgatcctcccagttcagcctcccaaatagctgatactacagacatgtaccaccatgcctaattttctttttaggggtcggggagcacggagttttgctcttgttgcccagtctagagtgcaatggcacgatcttggctcactgcaatctctgcctcccaggtttaagtgattgtcctgcctcagcctcccaagtagatgggactaaaggcatgcatcaccatgcccagctagtgtatatttttagtagagacagggcgtcaccatgttgaccagnnnnnnnnnnnnnnnnnnnnnnnnnnnnnnnnnnnnnnnnnnnnnnnnnnnnnnnnnnnnnnnnnnnnnnnnnnnnnnnnnnnnnnnnnnnnnnnnnnnnnnnnnnnnnnnnnnnnnnnnnnnnnnnnnnnnnnnnnnnnnnnnnnnnnnnnnnnnnnnnnnnnnnnnnnnnnnnnnnnnnnnnnnnnnnnnnnnnnnnnnnnnnnnnnnnnnnnnnnnnnnnnnnnnnnnnnnnnnnnnnnnnnnnnnnnnnnnnnnnnnnnnnnnnnnnnnnnnnnnnnnnnnnnnnnnnnnnnnnnnnnnnnnnnnnnnnnnnnnnnnnnnnnnnnnnnnnnnnnnnnnnnnnnnnnnnnnnnnnnnnnnnnnnnnnnnnnnnnnnnnnnnnnnnnnnnnnnnnnnnnnnnnnnnnnnnnnnnnnnnnnnnnnnnnnnnnnnnnnnnnnnnnnnnnnnnnnnnnnnnnnnnnnnnnnnnnnnnnnnnnnnnnnnnnnnnnnnnnnnnnnnnnnnnnnnnnnnnnnnnnnnnnnnnnnnnnnnnnnnnnnnnnnnnnnnnnnnnnnnnnnnnnnnnnnnnnnnnnnnnnnnnnnnnnnnnnnnnnnnnnnnnnnnnnnnnnnnnnnnnnnnnnnnnnnnnnnnnnnnnnnnnnnnnnnnnnnnnnnnnnnnnnnnnnnnnnnnnnnnnnnnnnnnnnnnnnnnnnnnnnnnnnnnnnnnnnnnnnnnnnnnnnnnnnnnnnnnnnnnnnnnnnnnnnnnnnnnnnnnnnnnnnnnnnnnnnnnnnnnnnnnnnnnnnnnnnnnnnnnnnnnnnnnnnnnnnnnnnnnnnnnnnnnnnnnnnnnnnnnnnnnnnnnnnnnnnnnnnnnnnnnnnnnnnnnnnnnnnnnnnnnnnnnnnnnnnnnnnnnnnnnnnnnnnnnnnnnnnnnnnnnnnnnnnnnnnnnnnnnnnnnnnnnnnnnnnnnnnnnnnnnnnnnnnnnnnnnnnnnnnnnnnnnnnnnnnnnnnnnnnnnnnnnnnnnnnnnnnnnnnnnnnnnnnnnnnnnnnnnnnnnnnnnnnnnnnnnnnnnnnnnnnnnnnnnnnnnnnnnnnnnnnnnnnnnnnnnnnnnnnnnnnnnnnnnnnnnnnnnnnnnnnnnnnnnnnnnnnnnnnnnnnnnnnnnnnnnnnnnnnnnnnnnnnnnnnnnnnnnnnnnnnnnnnnnnnnnnnnnnnnnnnnnnnnnnnnnnnnnnnnnnnnnnnnnnnnnnnnnnnnnnnnnnnnnnnnnnnnnnnnnnnnnnnnnnnnnnnnnnnnnnnnnnnnnnnnnnnnnnnnnnnnnnnnnnnnnnnnnnnnnnnnnnnnnnnnnnnnnnnnnnnnnnnnnnnnnnacaatggctcacgcctgtaatcccagcagtttgggaggccaaggtgggcagatcatttgaggtcaggagttcaagaccagcctgaccaacatgatgaaaccccgtctctactaaaaatacagaaaaattagctgggcctggtggcacatgcctgtagtcccagctacttgggaagctgagacaggagaaccacttgaacctgggaggcagaggttgcagtgagccgaggtcacgccactgcactccagcctgggcgacagaatgagactccgtctcaaaacaaaacaaaacaaaatctgtgaaattttctatttcagaaaacaaagaacttacccttgaaaaccaaattaaagaagaaagagaacaagacaactctgaatctccaaatggcagaacatcacctcttgtgtcccagaataatgaacaaggctcaaccttacgggatttgctgactacaacagctggaaagctacgtgtggggtctacagatgctggcattgcctttgccccagtatattcaatgggagccccagtgagtgatgccagatttttggttttaatgtgggccttaaatagagatgatttggagacttagtttttggctctgaactacccastatgctgatgaaatcaagtgtaccaaattgctaggcatgtttctatttgcattataactctctttaccttgaaagctggcattttctgtctttttttccaaggtgaaaggtggagggggggtgctcttcgattccagaaggtccctaagatacccctttagaatttggaaactatttgtctagtgaagggaaaaacccacatggaagtgaatgttgtatgttacttaaaataattagaagtcaaattttgctttaattatttaccaggaaaaaagagcagtataatttcttttaaaactatatggggggccgggtgcggcggctcacacctgtaatcccagcactttcggagactgaggcggctggatcacgaggtcaggagttcaagaccagcctggccaagatggtgaaaccttgtctctactaaaaatacaaaagttagccaggtgtggtggcacgtgtctgtaatcccagctacttgggaggctgaggcagagaattgcttaaacccaggaggcggaggttgcaatgagccgagatcacgccactacactccagcctgggcgacagagcgagactccatctcaaaaaaaataaaagtatatgggggctgggtgtggtggcttacgcctgtaatcctagcactttgggaggctgacgtgggcagaccacctgaggtcaggggttcgggaccagcctggccaacaacatggtgaaaccctgtctctactgaaaatacaaaaattagccaggcatggtgcatggtgatgcatgcttgtaatctcaactatttgggagtctgagacaggaaaatcacttgaatctgggaggcggagcttgtagtgagctgagatcacaccactgcactctagcctgggcgacagagtgagactcccatctcaaaaaaaaaaaaaaatgtgtatatatatatggagtattggggggtcaatcatgcctgtaatcctagcactttgggaggctgaggtgggaggattgcttgagcccaggagtttgaaaccagcctgagcaacatagcaagaccctcatctctatttcttataaaatatttaaaaattttaaaaaatgtatatgagggatgccacctacttgtattctctgtcccaggcctataacaatgtaaaagacrggaaggctgtacttctaagtttttcagacctggcagttctcacacaaccagacttctggtttgcattttgtcaggaatataggaactcaaatctaagagamgtgcatattgtggagtgtagggatattgtttaaaaaaaaataagtctgtgggaggaaaatgtatttgatttctctcaaaaacaggttttttttgttttgttttttccttaatagagtagcaaaagtggacggactatgcctaacattcttgatgacataattgcttcagttgttgaaaacaaaattccaccaagtaaaacctccaagataaatgtaaaaccagagcttaaagaagagcctgaagaaagcataatatctgcagtggatgaaaataataaattatacagtgatataccacattcttggatctgtgagaagcatattttatggcttaaggattataagaatagcagtaattggaagcttttcaaagaatgttggaaacaaggacaggtgtgtattttaggctgataaagaacactcttggtggaactgaagcttattaaatagaatggttccctccttaggaatagaaatggaggggggaaaaatagtggttaacacatttgggggacaataagatataaaagtaccgaaaagattgtcagaatgcttgtttctcaattcctgttttttggccagatttaatatgaattaatagggaaacgttgattattttatgttactttttgatctrtcagaacagacatgtaataacgccttgaatttacaaaatgcagttcctttctcctctttttagattggtattttagtccagttagtagatccatgtctactattaaaatattaatattggcagcatttttcatgaacctatgtagatgttcttatctgtaatatttatacacagaacatttacttacaaattagttcatcaaatcttgaatgacaaactatattgtttcattctcctctaatataaatgattttgttggacaaaagttttgataatgtttgatatacatttcagatggcaatttactacattaatgcaaaaattatgaacaaattaagtgtttgtatgacagtattctgttaaatttattgttttctggaaaatgtttactttgtttattcaacagttattgagcatctaataagagacgcagtctctgtcataggcagtaagaatatataaaaatgagtaagctatgtaaaaatgagtaagaaccattttagtgcaatgctgcttgatctttttaggttactaatccctttcaaaatctgatgaaagctgaatctttcaccccaaaaaaagaaatgcacacttgtgcattgcatatacacaagatttagcatgtcttttttgccttggtctccttcaagccctgatgacattactggactgaaattttatttaatttgtgtgagcttttgaggtagaaaagcgtcacacaaataattgttttcataattatgtgaagtgttttaagaactttgttcaaggtgctatgagaacccagaaaaggaaatgtcaaagctaggatactagttcaaaaaggctagtctaaattgattccttagaggttaagtgaagttttttgctaggtggacaagaggctggacatatacaagaacattaggtgttttgggaactctctgagtaggtgtgattatctgcaatatacatgatggttcatgggggagagtggtgtaaggagatggctagaggaatgatcatgaaatgcccttatatatcatgctaaggagttttaacattatactctaggtgatagttttaattgtggaatctgtataatcaaattgacattttataataactgacagcaaggcagattagaagttgagttagaagagaataataccattggcaaggagtctaatcagaaagctttacaggcctggtgctgtggctcttgcctataatcccaacattttgggaggccaaggtgggacgattgatcgcttcagcccaggagttggagaccagcctgggcaacatagtgagaccctgtttctaccaaaaaattttaattagccagacgtggtggttcacaccagtagtcccagctacttgggaggctgaggcaggaagattgctttagcccagtaagtccaggctgtggtgagccatgatcatgccactgcacttcagcctgggcaacaaagtgaaaccctgtctccaaaaaaagtaaaaagatcatggtgatagcctaagatttctgctttgaattattctgatacactaattagcttaacccttatcttttttaaaaaatttacttttaacaagctgctgattaccctaatagcagcaatattattggatagatactaggcactaggaattaatctgtgaattgccagcaagagttaactaatacctggacctatttttaaagtcgtatatattattggctcattgaaaaaatgtttaatggaacattcaaccatgtagtaaaccagaatttagggtgttttttctttttaaagatgtcttttgtaattaaaaaaaaaatctagctagagattattcttttgtggttcctatattttaattatgttacaagtttaagaatactaataatcacttaaattttttgtttgtttgtttctggagacagggttttgctgtgtctcctaggcaagatacaaactcgggctcaagcaatcctcccagctcagccttgggagctgggactacaagaatgcattgctacacccagcctagtaaatatcatttttcagaaacttttaagtcatagcttactgtgttctctatattccagaattctgcttcattagagtacaggaatttgtttaaaacctgagaataatacatcagatgttcttagatatgtttttatatcatttattgtagttttagaagctgtaaatcttccattactggtttctgcgttattagaaagctattagggaatttgggtggagaggacatctaccctccgccaccaagtgtaagaaagctgtgagggaatttgaatttatgtaatttcaaaggagacattcactttcagagaataactcattaggctcgaaatttaatagtttcagctactgaagaggctgaggtagaaggattgattgagcccaaagggtgacagtcaggtatgatgaggccactgctctmcagcctgggtaagagagcaagactctgtctcaaacaaacaaacaaacaaacaaaaaagaaagtctatrtatcttttaactgttatttatttatctatttataagcctgcagtggtttctggtgtgcataagaaaatgaacattagcctatggaaggcggaatcaattagtcttgattttggagaccaccaagctgatctcctgaactgcaaagatagcatcatttcaaatgccaatgttaaggaattctgggatggttttgaagaagtttcaagtatgttggtttttattttactattttctccatcatactccttcaaaatgataaattccaaatgtaacttaacagatttttagtctttgaaacatctgttttatgttgtctaataaaaagaaacaagtaattggaaacaaaatactgggtcctaatccctrtttctagcactaatttcctttgaccttaaagatgccgtttatactgttttgcttatggagaaatgtttggcagttccataagcttttgaaaatggaattatttatgtaaaactctttgaaaattaaaagtgtagatgtaagattgtgatgttaccaagatttttaaaaacaacttttgagatattacaagtgggtaatttaatgaattctattcatgtacaaaaggaacaaaggttttaatactacataagtacataagtaataagtcaataagcaagcaatcattaagcatgtaatgtgcaacaatcaaatcattcattcatttacgtttctttccaaatgttaataaagataaaaaggcagaaattacccttttagtaattaactgcattccttatagaacggcagaaaaacaagagtggagaaacagttgttttaaaattgaaagattggccttcaggagaagacttcaagactatgatgccagcaaggtttgaaacttttcattttgactcttgactttttgagatcgagctaagactgtccccagagataggataagtaaccgtaaatgtgacctgtaggctttttctttctcaattaaaaataaataacttgaggctgagcgtcatagtggctcacgcctataatcccagcactttgggaggccaaggcgaggggatcgctggagtccaagacttggagatcagtctggccaacatgacaaaaccttatctctacaaaaaaatacaaaaattagccaagcatggtggcaggcatctgtagtcccagctacttgcgtggctgaggtgagaggatcactggagtggaggaagtggaggctgcagtgagctgagatcgtgccactgaactccagcctgggtgacagagtgagaccttgtctgatggattgattgatagcaaaactgagttggtagcctcagcagtgggaaaatctttatgttaggacagtgaaggaaagaatgttcatgttaaagaggctgggcacggtggctcacgcctgtgataccagcactttgggaggctgaggcgggcaacaagagtgaaactttgtctcaaaaaaagagaacacaggaccctgtttaggacctcccttctattggagctttttaatggtttaatggttagagaagcagaattgctattttagtcagtatcacttgagtcaaggaaaattgttacctgtcttatggaaaggtagtctgctgttttgaacaacttgaaaattatatatgtgaaaatacttagcaatgcaaatctttatttataagaaggcaatgttgtttttcttcagatacgaagatcttttaaaaagtctgccattgccagaatattgtaatccagaaggaaaattcaatttggcctctcatttgccaggattttttgtacgtcctgatctaggacccaggttgtgcagtgcctatggtaggtatatattcacatttctcccatgtaggaattatattggatttttttaaatttttgctcaggccgggcatagtggctcacgcctgcaatcccagcactctttgggaggctaaggcgggtgaatcacgaggtcaggagattgagaccatcctggtcaacatggtgaaaccctgtctctactaaaaaatacaaaaattagccaggtgtggtggcgtgcgcctatagtcccagctactcaggaggctgaggcaggagaattacttgaacccaggaggcgtggaggttgcagtgagctgagattgcactactgcactccagcctgggcaacagagcaagactccgtctcaaaaaaaaaaaaaaaaaatttctgttcaaggatgggcgtggtggcccatgcctgtaatcccagcactttgggaggtcaaggtgggtgggtggatcatgaggttaagagattgagaccaccctggctgacatggtgaaaccccatctctactaaaaatagaaaaattagctgggtgtggtagcgtgtacctgtagtcccagctactcaggaggctgaggcaggagaattgcttgaacccgggaggtggaggttgcagtgagtcgagatcatgccactgcactccagcctggcaacagagcgagactccttctcaaaaaaagaattactgttcctacaaattgtctaatgatttttagtttctactaaatctgttccttttaatccatcgaaacccttttttatatgaagcaacatgttaggaattaccagcccaatatatagttaagtacctgcttattgattttttatttatttgatttttaatcatagtacattttattatagaaatgtaattattcaaataatagggtcttttatagattgtggcttttggaacaggtttttgtaataaggaaactaaaactcaaattacaattaaattatgcagatcgagctaatttgggggaatatctgattatgctattacatatatataaatattttgtcaagtaaaattttgttttatatacaggtgtagttgctgctaaagatcatgatataggaacaacaaatctccatattgaagtttctgatgttgtaaatatactagtttatgttggcatagcaaaaggaaatggcattctctcaaaagcaggtaaacttaaaagaataagtagtctttgaaataagagttgaataatcacattcactagtattgtccagaatatcagcttctgagttaacagcgaagatttcaaaaagaattgcaatggatgtaggggcattttagcccttattacttgaagattgaataattttcctatttctttttatgtaagtgaaattttaattttaaaattgaatattttaacttcttttctatcattaagtattgtgttgatgaaaatacaccattaagcgcacttgtaaacatttattgaggctgggcgcagtggctcacacctgtaatctcagtactttgggaggccaaggcaggtgaatcactggaggtcaggagttcaagaccagcctgaccaacatgctataaccccgtctctactaaaaatacaaaattagctgggtgtggtggtgcatgcctgtaatctcagctgctcaggaggctgaggcaggagaatcgcttgaacccaggaggcggaggttgcggtgagccaagatagtgccattgcactccagcctgggcaacaagagcaaaactccatctcaaaaaaaaccaaaaaatgaacaaacaaaaaaaatttattgaagaataggaactaattcttagggttctaaagatggttaaaatatggtttgtgactcaaacattcttttttcccctccagtaaaaagaggaagaagggggtcttttctctttctatccagtatataggttttcatttctgtgccctcaatttctttctgaaaccatggtgtcagttattcccttctttacaaagacatagatacagtcataggcctttaacgttttcttctccattggctttttctctgtacaatagaagcagagtctaagatgattttttctttctcgaaagaaagcctcctttaaacctttccatcctattggttctaccctcataagaaatattttaccatctttgtcactttccttttacatttcagctcattgcagtcttattccatactggtctgaaatttactattgctactgctgtcactcacacgtatttggataattcagtgtatctttctggttcgtttattactcrcccctgtctataatgaatggcaccgttaatcacaacctctttgaatatagttctctgcttctgtgataccacttctgattctgacaccttatggagttggaggcttcttcggagtttcagatgttcgctaccttttctacttcacatgcactttctgtgaaattctgtggatgacatccagccatgaaatagatcaccagttgtatatctggatcccagattggagcttaatggctaggtgctggggacatgggattcattatagtattcactctacttttgtgtacatttgacaattttataatacacaacctaaaatccctcaaaactgtagaaactcatttttacattatgctactcagctttttaactgacactattgactataataggtaaccacccctatcccccagagatttgagagtcagtgggcacacttgagttatwgtctgagcgctgccacagaaatgtgacctgtagttcagattatttatcctttctaatcctgtgatgccatggagttacatcctttgtatctcattgtagtttgttcagatctttccctgtagcacttagaagttaacctgctttcctccattactattcattcatgtccttaaaagctagaactttcttcctcatctttgtttatgcatatcccccagcttctgttcctagcatatttctttcgagaaaatttcaggagaatttcaacattttaaataatccttttgctctctttctttatctaaaaagtttttgtcactttttataggtggtcacaaagcaacattttagggttataataatgtttcaaacacattgaaaaatacttaaaagaacatgatttttttctccatctgccatgtgtcttttagctccatgtcttcctggcaaacttctgtattcattctttcaattgtaactcagattatcattcaccctagaagtcttcattaaagaaagtaaacttactatgctctagccagtcattctctttattatgatgcctcccccgcctcatgtacttgttattttaatttgcagagcagtaaaatttaaaggaaaaatgtcagaaaaccaatttaaagtttccagcttttaattttgttaagaaaacagattttagaaacatcaactgtcattttttaaagagaacatttcaaactctctataagaaagataagccaggcacggtggctcatgcctgtaatcccaacactttgggaggctgaggtgggtggatcacttgaagtcaggagtttgagaccagctagccaacgtagtgaaacccagtctctattaaaaatacaaaaattatttgggaggccgaggcgggcggatcacgaggtcaggagatcgagaccatcccagctaaaacggtgaaaccccgtctctactaaaaatacaaaaaattagccgggcgtagtggcgggcgcctgtagtcccagctacttgggaggctgaggcaggagaatggcgtgaacccgggaggcggagcttgcagtgagccgagatcccgccactgcactccagcctgggcgacagagcgagactccgtctcaaaaaaaaaaaaaaaattagctgtgcatggtggtgtatgcctgtaatcctagctacttgggaggctgaggcaggagaattgcttgaacctgggaggcagaagttgcagtaagccaagatggtgccactctactccatcctgggtgacacagcaaaactccatctcaaacaaacaaacaaacaaaaagataccagagtaaaggatgatttttttatgttcaactttttacattgcccttaatttttttgttttaccatgactgggaaaagactttgtcacagataacattggaggacttaacctgtctctgtaccctttgtactgatgtgattgcacttaccacaatgtgatgtttatttgtctagatttattaggaccctctttaactccatgagctcttgaatggatctttcttaattctaattcccaacttcctaggacagtgcctcgcacatagtaaacacttaccaaatgtttcaattagcagtggctcacgcctgtaatcccagcactttgggaggccaaggtggtggatcacctgatgtcaggagttcgagaccagcctggccaacatatagtgaaaccccatctgtagttaaaaaatagaaaaattagctgggcatggtggcgggtgcctgtagtcccagctacttgggaagctgagacaggagaatcgcttgaacctgggaggcagaggttgcagtgagccgagattgtgccactgtgccccagcacttcagcctgggcgacagagtgagactgtgtctcgaaaaataaaagaaaaaaagaaaaaaatatgtttgcagctaagtttgaatataaaatagacattactgtcacaaattaggaaacatctgatatatactttgtagcaggtaacagctttctttaaaaagtttatacaagtgataacatatttgactttctgagtttttttgctcaagataatggcttctagttccatccatgttgctgcaaaagacatgattttttttttttttcttttttaaagatagggtctccttgctctgttgcccaggctggagtgcagtggtacagactcagctcactgcagcttcaacctcctggactcaaaagatcctcccacctcagccaccagagtagctgggactacagacaggcgccaccatgcctggctaacttttttatttttttgtaaagacgggttttaccatgttactcaggctggtctcaaactcctgggctcaagtgatccactcacctcaacctcccaaagtgctggagttacagatgtgagccacctacccagcagtgatttcatttttatggctaaatagtattccattgtgtatgtatatcacattttctttttttcttttttctttttttttttgagatggagttttgctcttgttgcccaggctggagtgcaatggcgtgatcttggctcaccgtaacctccacctcctgggttcaagcgattctccttcctcagcctccctagtagctgggattacaggcatgtgccaccacacccagctaattttgtatttttagtagagatggggtttcttcatgttggtcaggctagtctcgaactcctgacctcaggtgatccgcctgcctcggcctcccaaagtgctgggattacaggtgtaatcccacgcccggccacacattttctttatccagtcatccgtggatggacacttaagttgattccttatcctgatagacattggagattcagaggatggtggttaacaggggtgggtaatgagaaattatttagtagatacaatgtacattattcaggtgatgataactaaaagccaagacatcaccgctaggsaatatatccatgtaacaaaaattgcagttgtaccccttaaatttatacaaaatttttaaaaagaatatttatttaaatgttcactggtccttttaaaaaaggaccttcctgtggtcctacacttagagacaactagttactatttttgtttgtacacttctaaagtttttttctgtacatacatacgtgtaggaattttagtttgtcaacattttagaaggatggcttgattttcctcaaaaccacaactttgttcgtgaaacatttgcatttgattacagattaaccattatcaaatatgagagcccctcgaaattaatcagaatacattttgtcctgccattcattagtcatggtaatgagtaaaacctttcacctcatggaacctttttactcaggtataaaatagaggttatcccttattcttaagtaagtataggggccaactaataaatagtgagcataaaagacctttgtaagttaggaaatgctatgagtacaagtcattgttaggaccacccccttggaacagggaaggaaggtggttaaattttacatagttgctcttaggttttctatctcctgcttcttggtttgcataaaacaaactgggaaaatcactattgctttgtatccacttatctattcttgtagtcctaaaagttatgaacatataactgtgtttgactcttttttaagagtactgatctggccagggacagtgtctcatgcctgtaatcctagcactttgggaggcccaagcaggtggattgcctgagctcaggagttcaagaccagcctgggcaacatggtgaaaccccacggctactaaaatacaaacaattagtcgggtgtgacagcttgcacctgtagtcccagctacttgagaggctgaggcaagagaattgcttgaacctgggaggcggaagctgcagtgagccaagatcatgccactgcactccagcctgggtgaccaaaaaagaaaaagtactgatcctagtcaggcactctgctgctctgatagatcaactttaggagacttggctttctggtattctttgccgacaatttgaaattatgttcctttgtttcaggaattctcaagaaatttgaggaagaagatttggatgacattttaaggaaaagattgaaggactcaagtgaaatacctggtgctctgtggcatatttatgctgggaaagatgttgasaagataagggaatttcttcaaaaggtataagttagtttgcaaataatatctcttcccctcaagcaaggacttattcattgttgccrtaccttcacttggcattcaacaatataagaccattacataatttttacttcaaagtagatgggagtttttgttgaaagtcaaaaccctgtttctcttgctyctctttgaaagtctgttaacattttgagggttttgaatggtgatttgttcccagttggtagtgtgcctccattccctgttaataaaagactgatctgttcttgagccagatattagttgggtggcgaaaagtagctatctggagtcgcgggatgtaaaaacaaatatttcatggaaacgtctaaagaaggtaggatctttattttctttgaatctgatagatatttttggctgctgacctagggaatgattctactctatcacatctgatactatgatacttactgagtagactcagattttgagtaatcataccttgactgtagttgtcatatactctgaaagaaatttatatatcaacctgaaataattggttgaaaccctttgctcaggtactttttaaacttcgtaattatggaaatttgttttaagaaatgttcagtgctgatacatcatctttctgaaaggatgtaagttctgtctgtgatcaatgtgaagtaaaagagttacagccttttttgtaccattttatccctgaatacttacctgtattttaatctgaagtatgatcatttgtgccttctaaagcagattatttaactgattaaagagtcccttgaaattgatttttcaagygttagaaggttagccatgtaaaggtatttatacttacctcaaaaaaggatcaataaatgtttatgaaatccatacatatgaatggtttggcttttggtaaaaaaaaaaaaaaaaaaataccctgttcctcatccatgtgctatacttttgaaacagttataaggaaggaaaccagatagatggaaacttcatagtggaaggaggtggtgagaaggaagtagtaaactgttaagagcatttcagcattgctgtattgttttaatattctttggctttccaaattattgcagaatgttattttttaactgaagaagctcattcagttgttccattgattctgagaagaaaagatttgttattacaaataaaattgaaatttaactgaacaggatttaccatttccttacttaaattggagtgtctattttaattcatatttcagatttcaaaagaacaaggccttgaagttctaccagaacatgatccaatacgtgaccaaagttggtatgtgaacaaaaagctccgtcaaaggctgcttgaagaatatggagtcagaacctgtactcttattcagttccttggtgatgctattgttttgccagcgggagcacttcatcaggtatatacaaacytatttctaacatattttttactgactgaaagaactagttttgaaaaaaaaattgctcttagtatagatataaatggaagaagatgcaaataagagaattacctgcaccagtctgcctttattagaatgacatctcagtgcttgcagaaatctcacataatttccttaagattttaaattgttttaacatgagccagatttctatttgtatactgtctccgatttaatagatcgaaatctgatttttaagccctcctggtgacatgtatacctctgaatagtgaggcttaaaagcatggggggacacagtatacagactttttatcaggctttaagcatacctcctacctttcttcagcatgctagcatagcaggggcctgtctaaagaaagatggtatgtaatttatataactgttgatccacaaaacataaaaactaaaataaatacctagtttaaaatacctaatttttccagcaccgggaaaaatggcatagaatagatgcagtggttatggagggtgggwttaaaagtacacagtggattcctataggtggaatggggctactacagcccaggttaacccttaaaattaacaaggtgtaccagggaaaccagaaaaaactcaaaagctgctttgcctcaacagttggttctccaccttttccactgctaagtaattgagatgtagctgatgtatattagtttaccaaggaaactttctcacattttatataagtatagtcattgactgttttagcatttatggcactcttccatacaaatactacttaggtgataataattgcttagcttttaggatgtgtcagattcagggtcagatttatcattattagatctcaaatggcatttatgatacagtagtaaaatacaaatgtcataataataaatacctttttctctatgataatttcctggaaaaaatgtatttacattaagtggttatattttcccatggacttatgattatttcagagatgtcatattatttatgtttcatgtttaatctgggattcaccctatacaccatttctttgacttctagactcttagcagaaaatagctaatctgtattcaaatgtaaatgctctcaaaagaagagcctatttaagagactagtattataaatctttttgtacataggaataatcctttgataatacaaagtagattcccttgaagatctttattcacatattgaatttatccaatgtcagtttttataaagttaacctaggtagtgtagtcatttttgtaaattgagatataatttgcatatagtgaaatttaccttatttaatgtataattctgtgagtttcaacaaatgcatagttaggtaacaacataatcaaaatgtagaacaattccatcactccgaaaaaattccctcttgcagtttttttttttgttttttgttttttgtttttttgagacagagtcttgctcttgttgcccaggctagagctcagtggcgcratcttggctcactgcaacctctgccttccgggttcaagcgattctcctgcctcagcctcccgagtagctgcggattacaggcatgcaccaccacgcctgtctaattttgtatttttagtagagatggggtttttccacgttggtcaggctggtctcgaactcctgacttcaggtaatctgtctgccttggcctcccaaagtgctgggattacaggcgtgagccaccatgctcggcatcctcttgcacttttatagtcagcctcttcccacccaaagttcctgcaactaatctgcttttttgtccctatagttcctcttttatgagtatgctgtaaatttggactcacacagtatgtaccctttaagtctggcttttcttaatgtatttgagattcattcctattgttgtatttatcagttgattctttttttattgctgggtagttgtatgaatatttttttcattttttaaatccgtacattcaccagctgaagtacattttggttttttccactttggggcaataatagataaagctatcataaacattcatatacatggttttatgtgaacaaagatttttatttctgttaagtaaatactgaatggtgggattgcytggtgatactataatgtatgattaaatttaagaaactgccagactattctctaaattggttgttccattttcatttcccagtgcagggttatgtgagtttcatttcctctgcttcctcactagtgcttgttactgtcagttttgtttttagaccattctagtaagtgtacagtggtgtctcatggtggttttactttgtactttcttaatgactaaacattgggcatctttttatatcttcatttgccatctgtatatctactttggttaaatatgtgttcaaatattctgtctatttagctgctttttttcttactgagttttgagtgtttttttgccaatttctgataatgtcttttatctgataatgtgttttacaaatacattttcctttcctgtagcttctcttttcaaagagcatttttttttcatttttccattttttaaaagacagtatcttgctctgttgcccaggttagagtgcagtggcacagtcatagctcactgtaatctcaaactcctgggttcaagtgatccccccaccacaccctcctgagtagctagtactgtagatggacaccaccatgcccagctgattttttaattttttgtggagatggggtcttgctgtgttgctcaggctggtctcgaactcctaagstcaggcaatcttcctgccttggcctcccaaartgttgggattgtaggcatgagccaacccacctggctggttttttccattttgatgaggtccagttgatcagtttctcttttatggatggtattttcatagtatctacaaaattgttgcctagcccaagatcactcagattttctcctcattttcttctagaaccattatagtttgaggtcctacatttgggtatgcaatgtagttcatctttgtatgtagtgcatagtatggagcgaggttcaattttttgcatatgggcatttggctgttccagtactatttgttgaaaatactactttttaatgtttttcttttgaaaatgtaatacataaacagaaaaattcaaaagtataaaaagttcacggtgaaaattcagtatctcacatttttcccccagttccttttttccagatgcaatcattgttaccccaaagagattccatgcttacacttgtstccctgctgctacttttttgggaacagtggtcttttagtaggctcaaagtgaccttgttaaaaagttaggttggtttacatatccacacttccccctctgtctcactgccttcatctcgtatggctctcctagttcctctctagccatcctgccctctttgcttctttcacacacaccaagtatgtttcccccctcccccagggtttttgtgcttcttaatcttttttgcttggaatcgtttttctgtcaggtatctgtaagacttgcttctttacacttttttaggcttcattcaaatttcaccttcttggtgaggtctagtttaaagctgtaaattgtgtcccccaactttctgtcgtctttcctgctttattttcctccatttcagttgtcaccttaaaatatgctttataatttactcactttgcttgtcttttaacccccactggaacgtaagcatgatgaagtaagagatttatcttttccattgctctcttcccatgcctagaataatgcacttaatgtttgtattattaataagtctctattctgaaggccagaaaatacgttctcagtaacaacatgtttttgcacaagggtagaggaaaacaaatttatggctttctataatttatatgtattgggctttttgtaaaacatgtaaatgtttacttcttcctatatgtgctttctctggctacttccaaaagtttacttaggttggaatccactttatgtctatacacattttctttgagatagttagaaaattcacatagattatagaaacaagattacatctataaaaaatgttatatctaaatacaccaaggcagcatatatgacctagactgacaaattatattctgagctctgccactaaattgctgagtgatccaaaacaagatctaacttctttgctacatattttggcacagaaattgccagctgtacaaaagggaattgctacctttcctctcctgtggggtgtaatgacaacaacacagctctttatactctgttgaaaggatgttgtccgtaattcacaattggtggcaatgcagttttaagagaaaattcaagggaagtaataagtgtttacaatattaacctggatttgagatgcattattacttacaacctgtttaggtcttagaagttctgaaaactgttaatgacttcaacacttccagtaggctataggtggccctcagaataatcagactctaaatcagtattctgacacttcagcatatgttagaatttcatggagggcttgataaagcagattgctgtaccccaccaccagagtttctgatttcaatgggtctggggagggacctgaaactatagatttctgacaagtttccaggaaatgctgattttactgttcagggaccacactttggaaaccacacaaataggaatctcatgcaaacccaaggcacctatcaaaaaattttcaaccaagtgattctgcatgacaagggccagcagtgctagggaagaaacaacattctgttctttggcccgtcagcaatgaccattgccagagccaaactgagaagagtgggctgtctgttcaaggaagctgagatatataatcttagcaagctgagggaaagcagcatagccacagccctctttatatgctaagaactattctagaattggagacttacaaatcttaccttggtaactgggactcagtctgtgaaactcctgtacaccctccacagagcaatgaccctgacctccaggatttttgtctcagctgtagtattctgaggtttagagtggcctttacttaaaaacagcaacagttgttttttttttaagttaacacataatctttagtaaaatttgtcgaaaaatactaactttgattgtgtttggtcatttatcatgagtttagaaaattgtaaagttgtaattctctgtattcatatgaccaaaaggacttcttggcaaaatctttccacactaagttctcacaaataactgagtaaatagcaatcacagtgtcaatataataaccttcctactatgaatacaaattatattttcttaacattacctatttataattataactgatgcttttaggcaagtatgaataagacaatgtcaaggaagtgaaatataaatgagtcaaatgtggcaaagaaaagggataatcagaatgagaagctgagttgtgttctgctttaaaactgaaccttggctcttcaaagtaaccctcaagcctttatccaaaatatatcaggtaggggtcattaggaaacctaatagcatcttgtaagcactaataaaggttactgttctaaaagtcattttaaaacaaccataagctggcaaagactgacagaatgaactttttcagaactctggaatctaattgaaaacttacaacagcaaccaagagactgcttaatgaagaaaagggcagctgatttttggcatttaaggaaatctctgttaggtaactggctgaccagtgagatagtggaacagagacttcagtgaccacacccaacaaggaatactgcctttgcaaaaacagtttggaaaagtcactaaacaaatggatgactggagccctcaggaatcaacaacagcaaaccctgaggcagggagagaatatgattacccattgtaatgttcagatgcccagttttcaacagaaaggtataaggcatacacagaaagaggaaagtatggcccattcaaagggagaaaataaattggcaaaaaccttccccgggaagcccagacattggacttactactagacaactgtcttaaatatgctcaaagagccagcagaaatcaggaaaacgatggatgaacaaagtgagaatatcaataaattatataaaaaaagaaccaagtatacattttggagctacaaatgattttaggacatgctagagctagatataccaaaagttctttcatgctaaaactttggaaagacttactctccttaagttcagataaatgaaagacataaggagagagggcatttggagactctgtatgctggtatgagagttaataagcaggactgtaaagcatctgttagacaagacaccgcaggagttgggctcctgttgacttgccatttattggctgatttgtcttgggacaggcgctgaacatctcatccatagtttcctgctctgtgaaatagagcatctgttctacagacacattatgaagagccagtgagactgtacagaaatgctgaaaatgtgaggcatccactatgttcatcctccagaggaaccaacagcctaatgattaaagaaagagaatgtttactttactatgctaccaagttatcaatagaggcacagtgcttgagttaaagaactctgcagacttcagcagctgttcaggtggtcattatgcccagaggaggaattctagcccctctggaattccatcaccctatcatcaattagattttttttccccacagtctccatttcccacttactatctctttcatctcactcctcccaattaaatttattttgcatacttagagtaactttaaatgcttagtttttcaattatttctcctttcccaggaatttttatgatgttttttaatatcactagaagacaatctagaaacaccacaaatcccagattggatcagcttgggccttcctctgttgttttactggcattaatagaaagcagctctaatagtcaagtgcaaagtcagtttgtaaatgctgaacaaataacagataagactattgactggcttcttgggaaaactgtttggtcaggagagagaaaactgttgaaaaactgttgtactgatgtcaccggtgattgaaggggtatctttaattggctaatttgaaagaaagtcacaaaagaaaggcatgaataaccaaaatcctgggatatttctgaaactcagtcgaggtcagtagatctgtctgggactacattttccatcccagttcctaacaaagtttcattttcttttctttattctctgatgtaagagttaacagtgaaatgaccaaaatcctgaaagccaatggagcaacaataaacatactcagatagattgcctcataaattctttcaagttagtttttaaaagtaacacattttttaaaagtccactttggcaaaattgataatttaatatctggttatcagcctctccaaaggattcctggaaaagttattttctttttatcatttaaaaatattccatttacaaagtcactttacatgaagcttttcagtgacataactttctcataaaatgtggtcttctgctttaaaatccatttgatgttttggagaaagtaaattctccagcagaattgtctcttgtgtttattggttttaaataacttggcttttctttgctccacctcctaaaacttgtatttcacggtttttcttttggggataggttcagaattttcacagctgtattcaggtaactgaagattttgtgtctccagaacatcttgtagagtcatttcatttaacacaggaactgagacttttgaaggaagaaatcaattatgatgataaactacaggtaagagttgggtgttctaggtcctgttyttcaggctttttatattcagaaatatgatacatgtataacagcttaggcagtcattgcctagttggtcacattagggtgacaaccaaagattaacaccaacatgtatttaattgtatgatttatagtgtcccttttggcttaacactttcaaacatttttcttatatttggctttcctagttccctattatttttttaaatctggaagttgtcattttttaattaatttctgtcgaactgaagtgattagaaatatcaacatctctttcaggttaaaaatattttgtatcatgcagtcaaagaaatggtgagagccttgaagatacacgaggatgaagtagasgatatggaagaaaattaagtgtgatccagtttgatatttttaggttgttgaactgggattacttaaccttgaatgatgatatgtatgcacactgactttaagcttcataaaaccatcagtgccaagaaattctctttgtagtaattacttgttactgacaccacagcagtatagcatatgtcacagctcctgtgattcaatgttataaaacaagcagaattttaaaagcagcactatatagctgttttgtattatagtgtatatgatgtttgtgaaaatgccagatttaaaatgatgtatttatttttggtaaaaaataaaaaattctatgctatattgttgatcaagtgtaaatgtgaccttgtacagtttactaaaattactgatatttttcactacattgagacrgttactgtgagaataggacacaaacaccagctattgcctgcatctgggaaattgctgaatcgcacagcagtcatgtcataatcagaaaattactgccaaataattgtaaaatttgtaaagtataaagtatataaagtagatactaaatacagacacttcaatattttgttgaagctattgactgtacaattaaacattttcaaaaggtgtaatttatttaaaattgtctcattttggtaaaatttatgtgaacttttaaagctaaatattaaacttaatatgctatgtaaatatatacatatatacatttaatgatgtatttttttaaaacattggcttgcttttgttaaagtgcaagtgttacatatggctttgtacattaaagttgaaaggggttttacattttccattaaaaggactttatcaaaaattgactttttccagagtactccctctgttgacaagcatgacactgggggcagagaagagcccgaagtcagtcatcctgggtataaatatgagttctgccacttactgtatgaccttagaaagttattttaattaatttgaagtcttggttttaatagctggctgctattgtcggttggttaaggctgacatattcccaaccctttaagttactggaaagatgtagctctccactgacacctgcaggatattgagaggatagcctttcttctcaactgaaagcattcagcttaaaagaaaaaagtgggagtccaagttgtgacaccttgcaagttgcttagtttatactgtttttccttatgtcaccatcgtttagctccatgtaatctgttacaacaccctccacttcaggcaaggttcagccaggaatgtgagcaattacatttcatgtgaattacctacatgtggcatttcacattaattacctatacttatcatgggatggataatgactacttggctagaaagaaaaattggcctgaggaatatttcagatgattttgtgaaccttctttggtgagcttttgacttttttaaataccatttttccaaatgtgcctcagctgataaagtggcttttgtctaatgctttcatatgttccatctgatttaattttgatgtaaaattaagtgaaagccaaggtgttaattctggagtagagtaccacctgctggtcccctaaagcctgccaggatcccaaagtctgtggtgattgtttttcctcaaaaccttttgcttctcttgctcttgcatgagccaccttttaaccatatttacaacttattctgaatagctgaagctaacgaagataaagccaggtaatgtggcttgtttcagtgcaaacccaccttaatgacagtattctatccgtagtctgaagaatattgtatccatagtctgaattccatgctgctgacctaattaattccttgtaaatctggggtgaagagagaggaccataatgcttacatccttaatgacatttgtaagctttttggaaggctggggagttgattgattgctgattactccctaatcactggagcagttcctctggcctttttctctccatccttttggttgggtctgatgcgcctcaggagtatgtctgagtatgtcagctccctccagacggtggtatggtgttatcttaaatgtgtacaataatttgagaaacaacaaagagcctttataaagggaaagtcgtggtgaatactttactttagttctttcccattctagtgtataatgttttttgagacactctcgctctgttgcccaggctgcagtgcagtggtgcaatcatagctcactgtagccttgaactcctgggctcaggtgatcctcctgcctcaacctcccgagtagctgggactataggcacgcatcactgtgctcagctaatttttttttcttttggagactgagtttcactctgtcacccaggctggagtgcaatggcgtgatcttggctcactgcaacttccgcctcccaggttcaagtgattctcctgcctcagactccggagtagctgggactacaggtgcatgccaccacacttggctaatttttctatttttcatagagatggggtttcactacgttggcgaggctggtctcgaactccttacctgatgatctgccagtctcagcctctcaaagtgctgggattagaggcgtgatttttaaaatgttatttatttatttattttatttatttatttatttatttatttagaagagatgaggtctctctcactacgttaccaaggctggtctctcctgagctcaagtgatcttcccacctcagcctcccaaagtgctgggattacaagtgtaagccaccacacctggccctaattgataatgtttttactggaatatggatttttcatgaataatcaatacgtgcattcaaattcatttctgccatgcatctggggactgtaatacccagacaaatcagtgtctggttttctgtcacttcccttcttggtagatgggttatggatttaataacatctgggtaaaattaataagcttcagaaaagtgctgtcatacctttactttgctctgtgcatgtataccatagatagattgatacaacatgttctgtttctagatgccagcctattaaagatgctctcacaaatgagatcagcagtcagccatgggagaggaaaaagtgatttagttattctatataatggtttttttgttttttgtttttgtttttgtttttgatacggagtttgctaatttgctgttgtcatccaggctggagtgcagtggcaccatctcggctccctgcaacctctgcctcccagattcaagtgattctcctgcctcagcctcccaagtaggtgaagttacaggcccacaccaccatgcccagctaatttttgtatttttagtggggatagggtttcaccatgttggccaaggctggtcttgaactcctgacctcaggtgatccgcccaccttggccatccagagtgctgggattacaagcgtgggacaccacgcccagctagttatcattctgtattcaatacagtattcagtatgaattgggataacaagttggccaagacacaaggttatgtatgctgccaggcctgtcaccaggatgcagactcagacctttccaactgcaaaagttatgacatggcctggttatgcaattactatgtaaacctagatagatatgctttgaaaccgtataaaaatatagcaaatgtgagtagtatgtgaagtactttggctcccacagtaatcagcctggttcttttaatgacaattaattgacttttaagtgacaatgaaatgttggcaggctccaggtcactggctgcatgccttgtaagttagttccctttcttggctggggaggttttcacaactggctatagctaaaacaggattgtccttctgtgtcttgtctgtgaaaaagacctcagccctggggccagcggagggtataccaaggacctgtgttgtatgggtgggtcaaatggactccactttgagaggaagggcattatgggtacagaagccaacaccacctcaccaccccttagtctttgacccaaattttgcagatgataaaagatgtggagagctggatgagtaaacaaatacactttgggaggccaaggtgggcagatcacgaggccagaagtttgagaccagcctggccaacatggtgaaaccccttctctactaaaaatataaaaatcagctgggcctggtggcacaggcctgtagtcccagctactctgtagactgaggcaccagaattgcttgaatctgggaggcagaggttgcagtgagccaagaccgtgccactgcactccagcctgggcgacagagcaagactttctcaaaaaaatagaaaaaaaaaatgagaaggaagtataagatgagatgcgaactgactgctttcccaaggagagcgagtgtggtcctctggcagcatagtaaggatggtaactgacaggtggggctactgtggaatatggaaacaacggttcaaggtaggtgatacaggtttgctttagtaagtggaagaagttcaagataaagactcagggatcactgtttccagccacacatgccatgccctacgtaagtgtaaggtagaactatcttgggccacgtgcggtggcccacgcctgtaatcccagcactttgggaggctgaggcggatggatcacctgaggtcagaagttcgagaccagccttaccaacatggtgaaaccccatctctactaaaaatacaaaaaattagctgggtgtggtggtgcaggcgtgtaatcccagctactcagggggcttaggcaggagaattgcttgaacccgggaggcggaggttgcagtgagtcgagattgtgccactgcactccagcctgggagacagagcaagactctgtctcaaaacaaaaaataaacttgtatttacaacttattcaaaagtgttaggcaggcattggtgatgtgatggttaaaaaatttaaaaaaagatgctgaggattggcccatctatgctaaatattatataacaggtatatacaaagtatttggaaaagctgtaataaattttgcctggggttagggaaggcttcagaaaggtagtatttgcacaacccttcaagtaacaaaaaggacagcaaatgtgtacatatttagatctccgtttggcccttttttataaacacattcactgagacttctatacacttttcaagagagatttacaaagtcattcactcttcatttcttgttctagaagggcagcagggaaggagctgcttcttggaatggcctttataagaggtgaatgtcaaatagacaaattcctatcatagatgtccagtaaacaactaccaggatgtcataggcaagtcaatgtagtctcatctctcccattctatagataaaatacaatcacattattttcacattaaacatctagaagatactgtggtagcctgaggcgtttttcttaatcagtgaactgaggccgggcatgatggttcatgcctgtaatcctagcactttgagaggctgaggccggcagattacttgaggtcaggagttcgagaccaggctgggcaacatggtgaaaccccgtctctactaaaaatacaaaaattagctgggtgtattggtgcatgcctgtaatcccagctactctggagtctgaggcaggagaatagctcgaacccaagagacagaggttgcagtgagcccaagatcacaccactgtactctagcatgggtgacacagccagaccccgcctcccaaaacaaacaaaaaaacattttatagccaacctaatatatttattttatcccctaatttatttgggagtgggtaatccgtatgtggggactcgtccccaaaatttttgaataactagaatttactcctgttttgcagaaacaaattatgttgaacaacaaaatattttattaagcaaacatttcatacagaaaggaaaaaggccagcctatacaaccttttaggaaactgaattccattttagtttctaaaaatcactacactatgaaaagtcccacaaatacaaaccacagggcttatatgaaaaatggtattagggcatagcactttaaaacttcaccagtgacacatttaaaaacagtgggtttacacatgttaaacatttaagaaatatataagcactacaaacaaatatggcactttaccttgaagacgacttgaaatgggcctcagaagggttgtggtttgtgatttgacttcctgtgaaatgaagggctatctggaatagagggaaaagaaggtgggttatctggaaggtgggctatctagaatcagagggaaagggagtatggatgggtgtagttcaatgtcactgaaagaagttagctggtatctattggaggtgtgtgtatgtgctttatgtgtttccctgcagcttggttcaagaggtgcagttttctgcgttcattttcttgcagaatgaattgcccactaagcaaacaatatattatgttggaagaaatttacatgttcaaaactaacttacagctgaattaacttgtacaccaaaagattcttcgaatcaaagctttctaaaaccaatgaaatcataggatttcagaaacccattctagaacattaaggatttggcatatctgttgaattggtatcatgtgacttgatccattatttctcacattccctcccagaggataaataaaagtagcaatttagcccctttagattgagtcccatgacaaattgttgtaaatgtgttctaaatgtacaagctccagaaattacttagtcctagaaaattgctgctcatccctgggccactgtagtctgctttcctgtatgcaacctgagttaggagtccagctaagtattccagtcatgtctttccaacctttagc

SEQ ID NO: 6806 - DNA, 41694 bp, Homo sapiens
gggtctcactgtgttgcccaggccgatctcgaactcctgggctcaagacatcttcctgccttggcctcccaaagtgttaggattactgctgtgagccaccacactgggcccaaataccaaattctaaatagaattggaaattgtgttattgaggatttagtgattactcttccctatgtcttgttaagtaattcttctcaagttgtttgcctttttccctctgtttctctcaccagttatacagtggggttttccagaggctctatgacgcgacagcatcatcactctggtggttaatggaatgtgtgtttgtgtatttctgagttctctagagttttgtaagttggtaggtattggtagaattggaaaatttttaacatttaaattttaaaaaattccttttttttcacatgctgtggtaggcagagataaaatattctctcatgaagtctgtattccaattttggggacagtatagctctaaggaaatacagttttcagtgctgttgtggaagagggagtaacagttttgatgtagaacttttatgaaaaagcaaaatggtagagagcaacaacagtaaaagggttagagttaaggttcccctctcaccaaatgataatggggtaaatgttggaggatttgctgctgctgtgcttacaatcaaaccttccttcatattactgttttgtaattcattctacactgaaatagttcattgtacctaacactgctccagccagcttttgaggcactgacttcaccctcaatttctcttaagaggaagagggaaaaaaatctctcactcgctacttcacagaatctgtgttgttatacatggaactttgttatggagagtaatttttattttagacacattgtaaatgtttcttacaatgattatttttaaagcaagctctagagtttccaaaactgggcattgagtagaatccagcatcgtaataattcagatttggttcctgtttgcccttgtactgtgctggagctcactgtcctggagctcaagggaacccactggcactagaggtgtattgagttgagtcaatggaacacctgtcagcttccatctcgataccatagggagcatgaatgttcaagctcttgctgctagaagtgaggaaagtggctgccgttatggtttttattaatagctttttttttttgtaaaatgtccttttaaatgaagacaagtttactttatgaaaaataatcaagtttatgctttgtgcttttgtcactgtgtgttatacttcaatttaaatcggaggctgaaaccagaggttcgcttgaggccgggagtccaagaccagcatcggcaaactagtaagaccccatctctacaaaaataaataaataaataaataaataaataaataaataataaatgaaaataaatgttagcttccagaggtaactactccctatacatttagacatatataaaatatgagaagttaagaaatttttcacaaataatagctaatgttagtggagtgttcacatttgttatttttttgtgcattaattcaatctttacaatagcccacttaagtaggtaatattgtccccattttacaaactgaggcttaacaaggttaagaaattttccttaaagttgggggcagtggctcacacctgtaatcctagcactttgggaggcaagaggattgcttaagcccaggagttcaagaccagactgggcaacatggtgagacactgtctctaccaaaataaaagcacaaaagaaaattagccaggcatagtggcatgcgactgtagtcccagctacttcagaggctgaggtgggatcaattgagcccaggagggcaagcctgtagtgagccatgattacatcactgcactctagcctgggtgacagtgagtgaaaccctgtctcaaaaaaaaaaggaaaaaaaaaattgccttaagtcatatagattgtaccagcagctctcacagtgtggactttggacttctaggagtccccaggaaccttttaggggatgcctacgaggaggtccaaactgttttcataagaacgctaaggtgctatgtgcctttttaactcattctctcacgagtgttcagtggagttttccagaggctctgtgacatggtgacatcactctgataattagtagaatgtgtgtgtgtgtacttttgttttctagaatattgtaaattgatagatttagggtataaatatatgtgttttcagagattaactcagtttgctgccagtgcttctactgtgctcttactggctattttcatttatacctgctgctgagtcatgaccacccaaaatctacatgttgaagctctaactcccagtaactcagaatgtgactgtttatttggggattgggcttttagtggggtgattaggttaaagtgaggctgttagggtcggccctaatgcaatctgtctggtgtctttataagaagagggaatttggacacacagagacaccagactagtgtgtgcacagaggaaacgaagacacagcaagaaggcggccaccctgcaggccatgaagagagggctcaggagaaaccagacccaccaacagtttgatcttgaactctgagcctccagaactgtgagaaaataatcgtctgttgttgaagccacccagtctgtggtactttgttacggcagccccagcaatggatacacgtgctgtaatgcagaagcttatgccagactctgtcttcttctgaccagacactaaagagatttgtaaaactgtaaaacagtgccactctcttactaatttgggggagcggtagagacggttgtttttcataaaatattctgttaatatgaaatgggtacatttattattttaaaataaatttaaattcttaatttgattttcaaatacagtaaatatcactatatatataactcacagaaacaaaagttctttggggtcctcaataattttttagtgttaagggctcctgacgccagaaagtttgagaatggctatactatactatacttccaaatgggatcctattatatatgatcttatataacgagcttttctcacccagcaatacatagtggatcacattggtctttaatagatacagatctacatcattatttgtaatgtctgcacaatagtctgttacaggtatgttttatcctttaattaggtggttcctggctaatggacattgaattggtttccaggatgggctattatgaacaattctggatctttgtgtgtttatctttttgtgcttgtggggtcatctagaaatggaattaaatggattttaagatacattcaggccaggcacggtggctcatgctggtaattccagcactttgggaggccaatgcggatggatcacatgagatcagtttgagaccagccagaccaacatggagaaaccccatctctactaaaaatacaaaattagccgggtgtgttggtgcgttcctgtaatcccagctactcgggaggctgaggcaggagatttgcttttgaacctggtaggcagaggttgcagtaagctgagatcgcgccattgcactccagcctgggcaagagcgaaactcgatgtattcaatttgggtttcttatgaggaaactaaggtttctcttctccattttagaattgctaaatattaagtgcaaacagaaaaatgtgtaaaatatatgtaccacttaatacatatacctagcagcagctcctcatgtttggggctattgtcttgaaaaggctaacctgccagtaattctttcaaacatgaggaaaaccaagctgggtgtggtggcttatgcttgtaatcccagcactttgggaggctgaggagggaggatcacctgaagccaggagttcaagaccagcttggccaacatggtgaaaccccatttctactaaaaatacaaaaattagctgagcatggggacgggcacctgtaatcccaggtactcgggaggctgaggcaggagaatcccttaaacttgggaggcggaggttgcaatgagccgagatcgcaccactgctctccagcctgggcgacagagtgagactccatctcaaaaaaaaaaaaaaaaaaaattgaaaaaccttttctttttcttcttttctgttttcttttgagaaagagtctcgctctgtttctccagctggagtgcagtggcacgatgctagcccagtgtagccttaattccgaggctcaagcagtcctctcacctcagcctccgagtagctgggaccacaggcatgtgcaacgtggctcattttttaaattttgtatagagatagggtctcgctatgttgcccacgatggtctggaactcctaggctcaagccatcctcctgcctcttggcctcctaaagtgctgggattacaggtgtgagtcagcacacctggccctttttttcttctttgtaaactaaaactattggccatttcctacaagttttacaccagtcatctggaaatttgggttcttcttcctaaatagcattactattggcttcactaatgggactggaatgttgttgattagctttcgacacaggactagtattgacccagcttgaaggtgctacagaaggcaagtcccactggagaagctacctgggactgtgggagccattttgaccctcagagtctggagacagctattgtcatattgatgggcatcttgacagcacctttccaaactctttattcagcaactttggtaactctggaagcccctaagatagcacaggaatgggagagctgtggtatctggtacctatctcctaagtgccttagagatatatagctagctttgctaaaaacgaaaacagaaacaaaaaaaaaaaaaacaacaaaaaactaggattgtaggattgagatggtggaaaagatggcaaattttgatgaatcttcagaactatgggacaccgtagccttctcttcccaaccagaggaaagactaactttttaaaaaaatgcccattatgcccacttagtatgtaattttgcttgcactttacagcagttttaatgatggtattaccattagttttagatagaaaataggtaattgctcaagaatccagccagtaagtgggattctgtcctctagtctccacgacagcaagccgtgctctctcactgtacagcgccaggacacacccaggaagaatgctttattactgtgagatgaagacgtcaatggccagggcctcactgcagcaccaccactaaatccaacagcaaaggaaacaagaaaacatggaaagggagctattgttttctgttttcccaacgagactccggcctgagccactgaggcattcagagttcccagataggccagattcagggtgacaaggaaccttgtaagctatgttttttcctactgattaagattatgttttttaaagcattttaaatttttattttatttttagatcacagcagctaagtctttttataaaaacacaatctagggcttgggtcccaaaagttcactaggttttgtcccatcagatgatgtttcctctttaatgtatttgtaatgtaaacctgtccccatttctgctgtgctcttgggactgtggccagcctccagccttccccgctggtatgtcaacatttaaatctacagccaataaggagggtcgcagtttcaacaaaacccgaaacacctcaaacaaaaccagcaccccaccccagccccccactccccggcttccccagtggcttattcaaactaacttgaagtcaaaaaaccataagcaaatatgccttttccaaatttgcagcctccaaggcagatgaaatggtcagacatttgccttttagggttgtcctgggaagagctgacaaaacgggtgacagcccctaaacagctgcctggggaggaggacatctgcctctgtttcaccagccactcagtgctcaggccttgccttgcgcaacgcggtgccgctggggagcaatggttctgagcagccagttgttatacggcttttgtcttaacgaagccacccattacggtagagccataactcgcaggaagccagctgtcagggctgtggcgcaggcccctctgggtgggaggcaaggggagaaaaacagtgtctggccaaattccctttccgacacctgagcctggctggctttgtaaccggagagttttgtgccctctcccccatcccatcttccccggggagatcctggggcccttcttgctctccatcctttgagggagctcagggacatttcgggattctggatttcttggtctgcaactccctgtgtgccaggcggggctgggccccgctgcggctggctggcgtttggcgctctcatcgagggagcgcttcgctttgaaatctacccactccttttttttttttttttttaaaccaggtatgatgatgtcaaacgtgatgctgatgctacagttacagcccctgctggcgcagcctctctgattctctctccctctccgcgtccagtgctgggctttttcagacaagtgcatctcctaaccaggtcacatttcagccgcgacccactctccgccagtcaccggaggcagaccgcgggaggagagctgaggacagccgcgtgcgcttcgccagcagcggggtgggaggaaggacattaaaatactgcagaagtcaagacccccccaggtcgaacccagaccacgatgcgcgccccrggctgcgggcggctggtgctgccgctgctgctcctggccgcggcagccctggccgaaggcgacgccaaggggctcaaggagggcgagacccccggcaatttcatggaggacgagcaatggctgtcgtccatctcgcagtacagcggcaagatcaagcactggaaccgcttccgagacgtgagtccgcagggctgccaaggcagagacccggggttgcgggttcggggattgagctccggggtctgcgggagcggccgccgcacgtcgcagcccgaggctccgcagcctggccggctaattacacggaaagtaaacagtactgggggtcacagcccrgcgcccctcccctgtccctgcggcccgggccggcggccctgggaccccccagccccgggacccccagctccacacctgcccgacgctccggggtcgcgcgctccggggtctcccctgcgggccgggagtgggaaggggtgcggggccggggggacccggaccccggctgccgctggaccccgacccggtccccagctgcgttgtgcgagccgcccccgggcctgccccagccgctgggatgctgcaggctgcacatacggggcactgcagcaccggcaggtctgggtggggccggcagtgagggtggcatcggctcgcgcggtgccctctgttcccaccgtgggctttgcgggagggggacagcatgggacgggagtgtgaccgrggctctgggtctggggtcccagcagccttctaggcgagatggtggaaggcgtgtccgtacgggggtgggctggggtccccgtgcagaagggcgcgcgaggacccaggctggttttcccggaccaacatttcaggggggaatccagcctggagcgaggggagcagctcggagccagaggaaggctcccggcccggtgggcttgagaagccggggagagtccagaagctgggtttgggggcccccggcgggcgccgcccgaaccccggcgtaaccttgggccgaactccgcggggtgggggcgggggggtagctgcggcacttttgtttaccggcacctgtggatcagaggggaagtcgcaggcggcggcccggcggggctggctccttcctctcggccgggccgggttgggggctggggaagcaggggtgaggcagggcgggyggagggtgtggctggaccccgagatcgttgggggtgctgtgggggatgggcccggatgcgccagaggcgacgccggctgctcctgrcgacctggtgctcaccgcggccctgaccccagaaaacctcttctaggaccctggcccttactcctccttccccaggttccctcgtccgacccacccagtacaacgcaggccacaccatgacctctcccgttttctccttaaactgcgtgcatccacaagttccttggaaatttgtttaaaacacacatgcttcataggctatccagccaagtgatgggaagaggcagagatttggatctttttgttaccgtcagacaagtgactgtttctccccaaagtcaaactggcaggttgtaattcacagaggacagcaggaaccacgggcagccaggtctccaggctgagtggccgggccccgcgatgggctgctgatctccgccttcgccccacatgcgacctgtccagccgcaggagcctggagccccgcgaggccttcccgaagcacctgcaggcccagcgcagatgagccgcagtctcctgccgcytcctgggcagcagcccggccacagcagcgagggggcggcagcaggccggcccatccggaatccatgtgtcactggcctaggcctccctccgactcgctggctgtttgatctgccaaaatgggaccagtgaaggtcagagggaaaagaaatgcttaatcagaacaggaaaggtttaaaataaaagattcctccccacctcccttcttccacctgcttccaatagccagctccgtgggtgagaataaatgacttactgcttgaccccatggcactgggctacccacctgtctctctgtattggtgccaaccacttcccccttcctctcatgctcatcagaagaaaggcactagatttgaaagtcttcaggacttgcacatgtaagattcatgggaaagctttaggtgtgtgttgattttggtagcctcaggcttttgtaggacagatgtcctctaaaaycccatttaaggtagtcctggctgcaggaggacagggtcagggagagaagtaggacaaagaaggctgggcaagagggcctggccctggggatctgttgacagcctctgcagaaaggcaggaaggaggctgctagctcagagccactgcattgcataactctaggggtgccacaatagaaatggtgccccctgaagttgtgcagtgcccagacagtacacagggtccccaccagcactacaaacatatccctcttctgccagaagaagccctacttcctgcctaagggctgaaggcactctaactgggcccagtagcaacgggctttatatttccattaggccagctctttggaaaatatgctccttggttcctcaaaggagagaggggaatttcgtttgaaccccttaaggggttacaaggttgaactgggaccttgttcataaccccaaaatggtacagggcycccctatttgtcctagtagggtggaggcaagcaggacgagtgggatactcttggggaacaggattgggagggaaatgcctcattcacatggtgtggacagaactgaagggggaacttgagggaatcaggttgaaagggtcaggagaatgaagaagagcatgaaaacttggggagttgctccactttggaattggccagagctggttgagagggagcgcagcttagcatctttctctgagcactaggattatagggaaggcaggatttaccagttgagtaatcctcccctccagtgggctgagggctcttacagcctgtgcctgggtcgatctcttctaatgctgggtgcccggctgccagggaggaggggattctggcagaagacgggggagattgtggactccgcctggctccctggcctacagatctagctgtaccctgccctgggcagtcctgggcttttccaagccctgctcttcgatgctcctacctcccaattcactccctgcacaactgggtggaatttaatgcaggtctttggaacaaagcatctagggcctagagggatggacacttggaggagacaggtccattatacagcattcttcagggcaggctccacagagcttggctacgaagagctgactgttctctttcttcttggctcttctctactttgtactccacttctatgaagttttcattatatttatgagtgtctaacacagtgcttggcacccaggaggcgcacagttcatataagttgartccctgatgcagtgagcactcacatctgccattaaattaaatcaaattaaagcactttaatttgagtggtctcttgtgcctctcaaggayctgggagatagttattgttactttacagcctaccattttatggttgtagaaactgaggcacagagaagtaatttacccaaaggtcaaatagctagtaagtagcagagctgagatttgaatccaagtcatctcacttaattttgcttttcagggaattctaggcctcacccttagcgaaagtgagaaggaggggtctaccctgaagagcaaagtatactctggcttgtgtcctctgagtcttcaaggatgccctgagtaggagtgtcacctcctaggaaggtgggccaaagccctcagtgtctccagcagcctgcctatagcctactccccacccaggcctagcaacactccagaggcagctctccacccaggaggggccggggtgcagtgtgctgggacagctctggcctgggtgccagttcgggctctgccgctgactggccccaggatgccgggcacatcacctaaaccctctgagcttyggtttcagactaggaaactgaaagggacgcataggtgtgaaggcacsttgccagggggctggagggcttccagggcaggtactacgctcctcccccacggaaaaaccaccagatgggtcctcatttctagggctggcccacaccatgcctgtccctgtgagaaagacgttactgcacgctcactgtcactcattcactgcagatctgagcccttcctgtatgccagggacttcaycatgatcctggggtctggtccagggatattgttacctgccggctaacaatatcgtgtgtttaggaacaccaagaaggcaagtagcaagtagccacaaaggggctccctcctgaccacccctccctgcttcccacmccacacacctaaaccactgcgagtgtggggatgcgctgcgccgacgtctgtgggtaagtgtgggtgtgtgagaagaacccaaaagtgggtcaggatggatttcataattggggtttgggtcctttgccagataaagtgactaaaaacaaaacaaaacatataacaacaacaacaacaattggggtttgagaatgggagggtgggcctttccctgacctcccctccaccccaccttctaactggagctggagcrgtgtcagcagagtgatgggctcttgaacacccagcgagactccaagcctgggaagagagggagagaagagccctctttgcctggagaggctgtcatatgctactccagtctagcagcagcctgagaggatgggaagccagcaccctcccgtccccttctcaaaaaggtcagaaggctacctggagcacagaagagctctgtcctaccctaagccccaagggccagagagagygctctgctcatcttcccagtgaggggacagaactagctgtgtgaccttgcagcagccacttcacctttctgggccttgattttcctggtggtttagtggggaggtgaaaccaaatcatctgcagaggctttagcatgctgtcactccaggaagagcctggcaatggcctggccacccacatgtataccctgcttatcctaccacaccaccgccacaggctgggcagcaggtctttgggtttaaggaagagattctcttttttctccagagaaagtacctgtgaccagattaggggagggtgtatattagctggagaccaagaaacctgagaaatggggcctaatggcatcttggggcaagcaccaggctgaggacacacgtatcatctctcttagcgtgggctgctgtaacaagataccagagatggggtggcttaaacaacagagatttattttgtcctcacagttctggaggccaggaagtctaagatcaggacgctggcagacttgatgtttgatgagggccctcttcctggccattatagcctcacatggctgagagagagagcatgagctctatgtagcctcttcttttttttttttttttttttttttgagacagggtctcactctgtcacccaggttggagtgcagtgatgcaatcctggctcactgcaacctccacctcctggactcaagcgatcctcccacctcagcctcccaagtagctgggatcacaggcacacaccaccatgcctggctaatttttgtattttttgtagacagggggtttcaccatgttgcccttgctggtcttgaactcctggactcaagcaatccacccccctccgcctcccaaagtgctaggattacagacatgagccactgtgccagcctctagcctcttattcagaccccaatctcatcatgagggccctaccctgatggcttatctaaactgaatccctcccccaaggccccgcctcctaatcgactcccattggaggtcaggatttcagcatatgggtctgggggggacacagatatgcagtccacaaccccgtctctgcgcgtctccttgcaggagcaatgtgggtcttctaagagccgtggatgggaaaaatgtatgcccaggcctatgcctgcatacacagtttagataccactgtgcccagcctcagtgtgcagacctggcccggctgtggctcttgaagtgtgccagcctctgaccgcccaagggcttggccagcatccagttgcaggtgtggctccttccttggggttcctgcagcatttattggccataactcatttggcacaggttggatgctgcctcatagcatcacttacactgcgggctgtatcttcagagtccttctgctggtatttgtaatgtgtgtttgtcacattcctcccatcgtgatcccctgaggagtgggtctgggaacagtcagccttgtgtaccttaccaccccatccccagagcattgcatggggtgtttggcacacagtaggtgctcaatgtaaacgtgtgcactgtggcatgttagagccagacaggatctcatccagcccgttctctgcacccctccctcccctctccaagtagccctgctgtgggttcaagtaaagaggggctggggcgctggtctgattgtgtgggtgatttggggagatctcttcctcttccggaaccccaaaaggttgggacaaacacagcaacaagcccagctccctgaatttcagtgattcatttgtgggataaaggagtgaatgataaagtgaaggacgactgtccccgcgtctccctgtccttcagccctccgtgcctatccctggctacagccagtctcccactttatcctgtggagagggtgctctgagcctcttccccactcccacaccatattatgcccacagagtgggccagccacctgtcagacatgtggatggtggagacagggctccctcgggtagagaacagattctgtagggtggggcgtccagccccctcctgctgtcttccccaacacctgccagtcggtcaaggctgccctgtatagaaggacaagccaggcccagctggtgtcttacctctgcctggatgcaaacagctcgctccttccctgaccccttgtcccctggcacagggcagaggacgcgaagtctctgaaatcgttcgggctcctattccgctcatctccaagttctcagtttggaagaactgggggagcagaatcctggagactcagaagcactgagccccacatttcacaggtgaagaaacagggccagagaaagggcaggcacctgcaaccccactcctcttgtggcctggggctcttcccctgcaccacggcctgtggctcagctccagccctggggtcttcctcagacctccctgggcttgaattctgacccccacccccatgttccaggagggaagccagggtcctgaggcagctcagaacatagccccgggcccctcacacctcccgctgttctctgccctttatggactattggggccaccgccyggagcagggaccaaggactagggcagccaccaagatgccactggaccagcagggaggtcagggcccgggcagcaggtgggtgttggcgcaggcatacctgagcccaggcccagcccggctcctggcatgcagggagtgatgatatgcacatttttgtcctccaaggaaattcctctgagggcagaggaggtgggaggccagagtcttctagatgcctgtctccttctgtttatccaggcctatcacagcctctgccgccccctccaagagaggctcaagtatttaatgactggcccctctgccccccacttcccagccacccccaccccctcrcagggacactgcctccccaggtgccctctcccaggtgtgtgatggggtgttaatcctcagcggaggaggatcccaggtgtccccactgggccccaccttgctcttttctgagtccttctgtctgtgccctgtggctatttccagggagggcaggaggaggccacagaggcaagcttctctccagtcctgggccttcttcrgtggactggcctccatcacaggccccgttgcctgaggaatgaggccaaaataatggcagatacagggcctctcagaggctgagccaggcctggcccacttccatttttagagattcttgatctattaaaaaatgaagaaatgccgtaacagggttagggaaattgtggtgtattcagtcttatgatgactgtcttctttccgtcctgtcgctgtgcctctggctgtgtgtcctcaagtggagacaatgtcagatgtccatattgagaccccttgtaacactgagaccctacagarcctctgcccagtcctgtccctaggctccccgggtgtgtgccagagaacccggggttcaggtgtcctgtcttgtgtcttttgaaagtatggagcttcagttcacaaagtccccttgcagacatgattgcctgggttcttctgcagctcagaggggaaggcaagggggtcatccttattttacagccaaggaagccagtccagcaagggaagcgactcacttgctggcagtcagtggcaaggccaagcaggagcccaggcccctgagtccttggtggtgaggggtgtagggggtgaggtctctctgtcacactgtgctgcaaagaagcaggtggatcttgaccccataagccagggtctggagggctgctcttctttgctgattcgctgctaggtcccaagcttcataccagatggagaagctgggagagattgggttaattcaagctgtgaagtgagcgggtgatttgggtgctaattaaaatgacaggaagtaaacagcacttggaaacacccagcatgtgccccctaagcctgactaggcctgcgcactcactgctgtctcccccagcttggctcagtgggcaccgtctccatggcaactgagctgagctgcagagatcaaagctgaagatgggttagctccaaaccagctgaaccaggggtcatgtgaaggggtttctgaaaaatgcctggagaacgggggcccccaggtgtcttccccttccaccaccagaccctcctctcctggctgcaaaactccctgcctaggacttgaagcagagttggtgtggtaggagaaaccacctgtgggctgggattgggcctcctgggacccacccctggcctaggacttttttcatcagctaacatttatggagtgctggttaggggcacggattctggaatcacagttctgggtgcagcactcttctcctgtgcaattgctgtgtgaccctgcctaagtcacttaacctctctgagcctcaattttatcatctgagacatggagataataatagtaatgtttcttagagctgttgtgaagaggaaacaagccaatgaatgtgaagtgtttagcataatgcttgccacgtggtaattgctataaagatgtcagctattgttaggagtgtgtattactaggtactagatgttgggcatagagagaagaaatttacatggtctctgctctcaaggaactggctatttaactagggcggagtgaggcagaggcgacattgcctggtgtcactggaacaatggtagacttctgtgaggcacagctggcctgaaggataaggagtggggctcgggaagatgatggctgagctgggttttgggagatgagtagaaattctggggctgatgtgaacttgcattctggatggagacagctgtgctggggtttggccatgctggaaccttgcaggaaggacctggagctggggtagccagggagagatcaagagaagatggaatttcttctgtaggtgactgggaacccgtgaaaggctttcaaaatataatacttattatattttttattatttttaaaatttattttatttttattatttatttctttatttttttgagayggagtctcactctgtcgcccaggctggagtgcagtggcgtgatcttggctcactacaagctctgcctaccgggttcacgccattctcctgtctcagcctcccgagtagctgggactacaggcgcccgccatcacacacggctatttttgtatttttagtagagatggggtttyaccgtgttatccagggtgctcgatctcctgacctcgtgatccgcccgccttggcctcccaaagtgctgggattacaggtgtgagccaccgcgccyggcctattatttatatttattatgattatgattatgttttttctctttattacaaagtaatatatgttcattgcagaaattttggggaaagttggagaaaagcagaaagatgtcagaattctctgtattcctacccagcagtggaaatgactgttaccattttggtataaatccttttcacctactcactttctttttccccaaaatgagatcaaactgtatattcagtttcaaagagagagagaccgggtcagaattgtgttttggaaggatccgggtggccgcagccgtgtggaagacagtgggaggagggagaccctcaggaggcgctgcagtttttcgggttggggtggtcctggccggtgggtgtagggcagggagggcaagcgagagggattcgggaggggaaggggcaggacagtctttgggttggtgagggtggcacggtaagcgtgctccaggaacgggcctggaattggaagcaggagcctgggttctcccagggccggcctgctcctcagcacaccttgtatcgctttgtgtgaggcaccctcggagggaggaagaatggctgtkctttttcatcccagaggccccgtgtttggggtgaagacacccaagaacataagcaaaatattagacatargcacagagygggagggacctgaggcctgatggctggcccagtggtctctaagctgcctgcctagagccagcacagaagcgtggcccgagctgggtaccacccatgggatttcaggggtctcaggtagcatgtgcgtgctggaaggtttaaaaagctccttggggaagggcacagtggctcatgcctrtaaccccagtgctttggggagctgagggaggaggatcacttgagcccaggagttcgagatcagcctgggcagcatatcaagaccctatctctatgaaaaaaaccaccacaataaaaattagacaggcatggtggcacatgcctgtggtcccaggtacttggaaggctgaggtgggaggatcgcttgagcctgggagttcggggctacagtragctatgattgcaccactgcactcctgcctgggtgacagagcaagactctgtctcaataaataaataaaaataaagagctcctcrgctgattctaaggtgcagtcaccactgaggtcctcaacaacgaggaagtgacttctttgaggacacaccgtgggccaggctgaaagtggactcctggtccagtgccccttctatgtcctctctctgcctcctcctcctcagtgcagatgctggtcctctcttaaggagagagactctaacttgtggggtgggagggggcgatggggaaccctgactcagctcctcttttgtcttgccatctctggccagttgctctgcctctctgagccttygttttctcctttcttctggtgttgatcctattggctctgactacttcacaggactgtgaggataaaaggcagacccatccaaatgcctggagagaacttactctaaaagcaccatgcaggctgggtgcagtggctcacgcctataatctcagcactgtaggagtctaaggcaggaggactgcctgagcccaggagttcaagaccagcctgggcaacatggcaagaccccatctctattaaaacatttttttaaattaaaagctttactcatatagataggtagatagataagcatatataagcaccatgcaatacaagccacgagctcttccaaatccccattttccaggtgaggtcggcagcagagccacctgccaccactctcaggtgtagaacggggcctctgtttcctgagaagccccaggtgccctgatcagactatttctcacaactgctaatgagcccactggggtgccataaatagacacccaacactgcactgaaaggcattatttgcacttgccaacaaacacctttttttcagcttaaaggtggcgccagcccacacctggcctcagggacccctcagtgtgtccttgagttttaccctcagagtggccactcccmagctgcccagaggacttcctcgtcattcctccccacaagacctcctaggggactctcctcgtatcccttctggtctctgctgtccccatggtggcctctccctctccacttttttggggttcctcatgtggcatctctgtccctcattttccgcacttgcagtccgggggtctcttctccatcatagcagctttgatttgttaagtgcttcctggaccccaggcaccccgcaggtgccatctgctttaatctctgagtagtcctgggagataggcactgagcccctcgaggtcgggtgcttgcccaaggtgcactggtygggggaagcctggggatctgcaggaccccagggccctgctctcctcgtccctctctggctggctgcctttgctttcctgggagtgagggtcctggaatccagatccactggggcccctccatcctgcctgcccagcctggccacagcagaggcaaaaagtcgaggctggaaccgggggcagtgctttgcacagaaggggctccctccctgccagctgagtcaggaagggagtgggggatggtggagcagctggggaaagcccctttcttagaactcccacgccatccccactttcccccaaatttctaatcataaattcttggtcttgacctttgagaatccactgtgtactgagtcccaaaaattccactcacsgcctggttggaggttaaggcagcagggttgggccagaaggtgggagtgagccggtgccaggggcctcagatgacacccaggggctggaggcaccttccctacttccactctggggyaggtgggttatgggcacacagatcttgttggttgagggcaggtatggttgagggctcatacctccctcccagaacccagccatttcccatcacctgcacagccttgtccccacccctgccccaggggatgatgggtacagacgggaagaccccagctgatggagaccagttgccacttttgccccaacccttgtcatcatggcctcagcagctgcacctctcttggcctccctccatctcctgtggggtggacccccagcagaggacccctgaaccctgaggagctcctggagaaggcttcgttggttttagcaaacgagggaagtggtgcctgcagcctccccagaggcttgcctgggggctcaggagygctcaggtcaagcctgagggatggggtgagtgctgggccaggtgccccacaggctcccaggaagcacccctgcagccttcctctgtctgctcctgggcccaggggctgcgggactcttggctgctaggacaggtacgtgtgggccaggtgtgggccgagcagagggatgrggaagaggctcaatgagagacagaggagagagggacacaggaacacacggggaggcacgtgaaagcaagaggaagaaggagagagagggagagagccgccgtgggctctcacgggagcagtctgcggtcctcccgccctccccatccttcccgactcctgctgcctccttctctcactgcggaagaggcaggaaggccagcctgagggagagcctcgagtgtgaaactggaggctgctcacagagtgggttttgttacctcgtttctggataaaaaccatctggcactgggtgaacaatgtccttgttagtgtccttgttttccttctgtcactacacatgtgtgtgcatatgtccacctgtgcataaatgaggatgtgcatacacacaaacatgcctgcacacacatgctacataatacagacctgtgagtgtgcatgggtgcacctgggtctgcataaatgcacacacacatgcagaagcatgcactcaggtctatgcctgtgcacaccgcatctttctcggtggtgatgccaactgcttgctcgggtctggccccttcggcctttgtccaggaggcctcaccctgcctgctctgacgcttgccagcttccaggggaggcttcagaagcctgaaggccttggatttcaaagccctttaggcacccttctgtgtgcccactgctgcacgcatgtgggtgccgtttggtkccatggccccaccgcccttttcccccagacctgacagctctgctcacccctacacatctctgctcctttgggctatggcagaactcaggatgaagggggcagctgcgcgtagcttctcatgcccctctccccccagctcccagagcccctcctggagccccacgcagaggaagtgggcagctggtccttgtcactgccagcctgcaggcctgggaagccccctccttgcctgcctggcagagtttccaccaggagtgccctgggactgttaggtgttttttagcaactgtctctgccccgtaggggaaagggaggaagycagataagttgagtgttcttgccagggagctgggtcaggtgggaggctctctgcctctggccactctgcggtccacgggcctgagaggcccctgcagctggagcagggtgagaaggtctcccttgtgccttaggcctcagagagtgtgttgtagcaagaaaagtggtctgtgctgggcatcgggagacctgggttgtgtgacgggaggacctgggtcaggtcatctgtctctgrgctttctccggcacaaagggggggctggaccaggtgacctcgtaggaccctttctgggtcctctgcctctgagggtttgaagctgaatcgtgataactgggcaagcctcatcacaggcatggcctcctccctcactccgtgtatgagctgagctctgcagagatgtcagaccttgagcaaaaagcatccctttgcagactgggtgagggggtcttcctcccacctcactcacatggtgggcagaggtcaggagtggggactgacaaggaaggggccttggcaggagacagacagtgcaccgtttctcaggcagtttctgagacacccagggcayaggcatgagaagctctgttccyacgcagcatgggcacctcggacatctgtcctggtggtggggctggggctggactgggaacggagtgggggtgccccaccctctcaaagccacgggcccctgctactcctaaggccagtcttgagctctgtgatgaagacrtaagaatactggcctcttattggggttcctgggggtcagaggaacacagccatcgaaggccattgctcggccacatgatgaggcaggggaccccaggaacaccagagggcctcacactgatatccccatctttctccctttctcttcctgctccgttttccatggcctgctgctgttccctgatctccaggaagtggaggtgagtactgcccaggaccccactctgtgtggtctctgcagagcacaccccctcccctcctgtgtccctccacaccctcaytctgacttgccttccctgccagcctccagtgtggcatgggagcaatcaggagctcacgggagaggctggaaaggattctggacatgggtttatagggatagaggtgtgggggaggcagctggcagggcctgggtggacgggtcagccaccaggatgacggccattggcacatgacatcgctggcccaggcctctcctcgaccccgcagttgaacctctgggatatggatcttagcctttcccttctcccttgtccctctctgtcctctaggatgactatatcaagagctgggaggacaatcagcaaggagatgaaggtaacatgactctcccggcgggggaaggtgactgacacgtgtgaagacttgagaccagagggcaagcccttagcccgcttgggggctccttgagcagccaggccccggtggggatgggactcctgagctcaggagctctggttatcaagggctgctggagggagaggcctcccagctcagaagtggggctggaggttcctgggttctcccaggtgacctgtgtcctgactctgtgcccctgcagccctggataccaccaaggacccctgccagaaggtgaagtgcagccgccacaaggtgtgcattgcccagggctaccagcgggccatgtgcatcagtcgcaagaagctggagcacaggtgagaggtttggggaggtgggagccctggagggggtgtgttcaaagagcaagggctcaactgaccctctccttatgaattagccatctactgctgttaaataaattgtaaaacttagtgcttaaaacagcaaatatgtattatctgacatcatttctgagggttggaatccagaagtggttctcttagatggttctggctctgggtctgtcttgaggttatagtcaaggtgctggctggggctgtttcatctgaaagcttgtcgggctggaggatccacttctaagctcactcttatgctcttggtgggaggcctcagttcctgatcatgtggacccctccatagggatgcttgagtgtcctcacaacatggcggctgccttcacctaaagtaagtcatttaagagatgagcaaggagaaagccacaccatatgagaacaattaccaaaccctgtgggatgcagggaaagtcacatctcctttttgggccttgaygtagtatctctaagacaaataggttagaccatataatttgaggttcctttcagctctgacatgcagtgacttcatgaaatatttaaggtggtagcttgtgagaggttgtagcttgcagaggagaaaggagtgagggacatttaaggaagccttagctccagctgggtgcagtggctcctgcctgtaatcccagcactttgggaagccaaggcgggtggatcacctaaggtcaggagtttgagaccagcctgaccaatgtggtgaaamcccatctctactgaaaatacaaaattagctgggcatggtcgcttgtgcctgtagtcccagatactcgtgtggctgagacaggagaattgcttgaacctgggaggcggaggttgcagtgagccgagatcacgccactgcactccagcctgggtgacagagtgagactccgtctcaaaaaaaaaaaacacaacaaaacaaacaaaaaaaggaagtcttagctccagcccaaggacaaggctctgcctggctccaagaccctggaaaaggttccagttccctcccttctttcctgaatcatagaagatgaaagatggggttgcagtcttagaaggctgcaggggcatggccggtaatgtaatgcatgaagagtgcttggtcacgggccactctgtggagcacaggtgtggtggaaagcaggcagctgcttcttggccctggtctattacagctatgtaggaatgcaggtccaggactcccatgcttccatttttcaaagacaggccaagaatccaggtatttatgtgaactctcccatttggtaaatgttagtgcataaataactcaattaaaaaaaaaaacacttggtggccaagtatggcccagaggtcatcagtttgcaacctcagatttggtctgaccccctaagtgaagtgtgacccccttttacctctggccttcagacctggagttgctacctgaaggccccatgggactcagtgactcctagaagaagagaagctgggggaatttatgccctgctcagttggttccacccttctgagctggaggagggtctggcagcagtgtggggagggtgggcaggggcaggaaggggctgatctgctgaagattgctgctgccttcctgttggaacaggtctgctcagccctcccttcccctgctccttcctcattgtcacttccaccctggtgtgccccccaccctctcctgtaggatcaagcagccgaccgtgaaactccatggaaacaaagactccatctgcaagccctgccacatggcccagcttgcctctgtctgcggctcagatggccacacttacagctctgtggtgaggagcccaggccccaggtagggtgggggtggagtcacctgaggccacaggaagcagaaaggatgacccagctggggcctccggaggggtttccaggactgaggtggggccagatggcaaggtcagtgtgttcaatgcagccagccatactggggccacctgcagccctggctggaactacctgagagttggagccagaccctgtctgtccctgacctcggacaggtgcaggtggggagtggggcctggaagagacactatggtcaggtaactgcaagtcaaaggaactgagggaagacctcagccaagtgtggagggctgtggaagaaggagctctggcatccaattgttagtgggggaagaaaggaggatttccacagggaggcgccagtgttcaccagtgagcaggggccttctggggcagcaggaaataatcctccataagaaggtgatggaagaaggaaccgattgggagaatgaatttgcaccttatgtggatttttatgaggatttcaggagacaatatttgagaaagcatttaaaaaattttaggctggtcacggtggctcacgcctgcaatcccagcactttgagaggccgagacgggtggattgcttgaatccgggagtttgagaccagcctgggtaacatagtgagaccctgtctctacaaaaaatacaaaaattagctgggtgcagtggcgtgtgcctgtgattccagctatctgagaggctgagggggatgccaggagttcgaggctgtagtgagccatgattgtaccactgcactccagcctgggtgacagagtgagaccttgtctccaaaaaaaaaaaaaaaaaagtaacatagaaatgcaggtgctgataatgaatgtttttactggcaacaaggagtcgggaattgcttggtttgggagggcactgacagctggcttggggtgggtgccagggctgaggggccttcttggagtgagatgcagatttcagtcacccgctgtgggtgatgattgacattgctgtggggatgaggtcatccagggagaagaaagggaggagagagagaatgagcaagaggccagggcagaggctgcatttaggaggtgagaggggtgcaggggagctggcagagctggcagagaggaggaggagaagaagaggagctagtgtcccacaacccaaggccagggcgaggtctgggcaggacgctgcagtgyggtccggtccaggggtcacgctgtcctttagggaggtggaggtcagcaggaagtctggctttcatcccggctcatggccttgggcaagtcactgggcctctgtgcrccttgctgttctctgctgagcaggagaaacccaagcctcccaagtgagataatgttgtcgagcgctgtgatgacccgcttcccattagcagccgccccatgagaagaaagagatatgaccaggagaaaaggccctggtcagaacctggctttagcaggcagctgtggcagaagcagttcttagcgaaggccgaggaattgttagatgctccataggcggtgctgtgtcctatcaggagaactgagaaaagtccactggggtgactggggggagatcattgagggaagggctgatggctgattacagagggaccaaggaacaggccatgagagccaggggggcaacagacagctaacacaggggaagggcgacaggggcaggggaggggtgacaggggcaggggaggggagacaggtgtcctgggagggacaaatccttagagagggccgagcaggctcatgggagcctgcatggctaggaccagctctgagccctgcttcccgggccctgcttctctccaccgtgcacctcagtctgcagaggaaccaagaggacccttcaggctgttcatgggcactccatggggggaggcagatgtggctgccatgagaggcttgagggtgtccccagctgtggggacccctggggtaagccctcagtcccctgttccacctttccccatgtgcagtgtaagctggagcaacaggcgtgcctgagcagcaagcagctggcggtgcgatgcgagggcccctgcccctgccccacggagcaggctgccacctccaccgccgatggcaaaccaggtgaggacagtgctgggccaccaggctaggggtgctgaagggccacctggcacctccttcagggctctagggtggtagaagaggtgtgcagagcaagagggaagtggcaaaaatgcagaaagcttgagggagctgtgaggtcagaggcccagattaacacagagcaggaggcgtgggctcagccctcgtttctcccctgggtgcctggaaggtgggcagagggagggactcagccacaaggaacctgggctgtgtgtttttcatgccaggaaggagtgggtggtgggaaatgggagaggactcgagaggaagcccccgatttccaccttcccttctgctgctgcctcccggacccctgcccagcctcctggcctgtagggcaggatcccagactgagatcgagcctgctgctccactgcacattcgccctccatgccttctctctgttctgcagagacttgcaccggtcaggacctggctgacctgggagatcggctgcgggactggttccagctccttcatgagaactccaagcagaatggctcagccagcagtgtagccggcccggccagcggtaggaagcttgctgctctgcctggaggagggagggaaatagggaaggggctgaggacacaggtgtatgctgggccagyctgcccttgttccttcctgccagactctgggccctacaatctgggccccaaaagaaccttcaccccaaagaagtcggcttccaccagagcaggagggataccagttagctagyaggaagaacttaacatgggtggagggagcttaaaccctgacatgggtagcccagggaaagcaggaattcttttccctgcagggctttcagaacgggttttgaatggttcaggcatagtcctatgtggaggtggaaggaaggacctttcgccgttctcgagtttctcaatcccatggttagattccaagctgcccagacccagaatagagggctggggctgatggcgaggcggagagatggagggctggagaaacggctgaatagccagatgaagcgtgcctgaacctgatcttttcccagggctggacaagagcctgggggccagctgcaaggactccattggctggatgttctccaagctggacaccagkgctgacctcttcctggaccagacggagctggccgccatcaacctggacaagtacgaggtctgcatccgtcccttcttcaactcctgtgacacctacaaggatggccgggtctctactgctgagtggtgcttctgcttctggagggagagtgagtgcagcccccctcccaggcccctgcctcacccgtgtgggctctacccgaagttccaggctctcttgggaagtcagagtggctctttcttggctacgtccccaggcccagcactttcccagcttgcccacttcctgcactcccttagggcttcatcccttaaggcccagggaagccaacactttcagctcccttccttggcaggctcccaggcggatccagattttgtgggtcctgaagcttatatacttttggaggtcttctttaagaaagagttaaaaaagaaatcccagcactttgggaggccaaggtgggaggatcrtgtgacccaggagttggcgaccagcccaaacaatacagggagacctcctctctgtgaaaaaaaaaaaaaaaaaatagccaggcatggtggcatgcatttgtggtccctgccacttgagaggctgaggtgggaggattgcttgagcctaggaagtcaaggctacagtgagctgagattgtgccagcgcactccagcctgagcaacagagcaagaacctattaaaaaaaaaaaagaaggaaagaaagaatatgaaaaataacgaatgtaaactttctggggcccctcagagggcttgggaaggggctgtacaagtgagggtcttagaggtgaagatgcatttgcttctcggtgattcttcttttaggcacatcttaaattttgtgccaccaataagtgattacatacgttgtcatcagccttagagatgtgatgaaatttctcagctgaatatacctgaaaccagagctttcaaaccagagtcatctcggaaaatggaggtccccaggctcacctgacctgtgtggcyggagctggggaagccctggtgttcctcactggatgcttctccccatcttggtgggggatcggcagtcagggcccaaagcttcagcccgggccccaccatacgctagtcagggacccccggcaagtgaccacatctttctgagttctgcttcttcatcygcgtcaggaaataacaatacctatcttggagcctgttgtgaggatgagccaagaaaatctgtgcagagcaccgtgtaattcacaaatccctctgcaaatgtgtggtattgtgatctgtttcaccactctgactgcccagccctcctgcgaccagcatcactccagcactttgactttctgggcctttgaaggccactccatccattctgtactttcttgggcaggaggccgggaactgtcctcattttacaaccaggcaggcttccagcttggagaggtggggacttcccaaggtcgcagacaagttagaggctggctgccggttacagtcatgcgtcacttgacgagggggatacattctgagaaatgcatcattaggtgattttgtcactgtgcaagcatcataggagtacttacacagaccttggtggtgcggcctcctgtgcacctggcccattgctcccaggttacaacctgtgcagcatgttatgtgctgaatactgcaggcagttgtaacacaatggtaagcatttgtgcatctaaacatagctaaacatagaccgggcgcggtggctcacgcctgtaatcccagcactttgggaggccgaggtgggtggatcacctgaggtcaggagtttgagaccagcctgaccaacatggtgaaatcctgtctctactaaaaatacaaaaaattagccaggcgtggtggcgggcgcctgtagtcccagctgctcgggaggctgaggcaggagaatggcgtgaacccgggaggcagagcttgcagtgagccgagatcgcgccaatgcactccagcctgggtgacagagcaagactccgtctcaaaaaaataaataaataaaaaataaaaaaataaacataactaagcatagaaaaggtacagtaaaaatagtgttgtaatcttatggggccaccgtccattgttgactgaagtgttgttgtgtagcgcgtggctgtattttcaggcctgggagttctctctaacattccctctagcattacgttcccctgggctctctcatacttgggtgtctgtgtgttcaccccacctcctcttctgaatcctgttactcctctcatgggtccctaggacttcttggggacctcaggtcatccacagctgtggratgagctcccctaaatagagastgagcgttttygtgccatagaacccttgtacttcccacccctgctgtggggtgaccccgtgtcagaaacggggtgttttcatcttgcagagcccctgcctgggtctctaagccttgaagggctcagtgcatccccccagcaccaggggacagtcccatcagaggctgcttctctccccacagagcccccctgcctggcagagctggagcgcatccagatccaggaggccgccaagaagaagccaggtgaggggccagaccaggctctcagaggaggaggtggggacggcttcctgggtttgtctgagacccagggcctccagccttgggcctcatggcagacatggagcccagaggaggccctggcctaggaagacagaagagggttgcccccttcctgtgtctatccttgtggtggggcagggactcccaatctgccccrggaaaagtgtgttttaggcactaattttatgcccatccatgctggagctagagtttgggatacagaaggatcctggaaccctccactgagttcagtttccttcagcaagggtgtgactaatgttttagtgaggccactccctgagtgacactcactcacatgctccataaacacctgggggccggccccagagatacaacagcaatagacccagcccaactctgagcggatggcaagamggatgcactccctggcctcataaccctttagctcgggccagtccggaaacacacaacacacaaatggacacactaaaaagacagaactagcagtgtgacctgtacacaggcgcctgggagcttcagctggggagcctgcaggaaagcaagtgggccccggaggcaggtcggactcagagtggctgggaggagaaggctgggcyttcctagcaggggacagccaggccggcggaactgtgggaggatggagagtgtcaaacctggtgaagtcagactggctgtcctagaagacttgggccatggagtcagggaaactgatggggcggctgggagctagcacaggggcctgagcagtggttcaaggaagcgggtttcctcatctccagcgagtagagccgraagaattgctggctggtgtccagctctcagcatctgggcctgttggggggtcagcacccggtctggctgggctctgggggtgyatagacttctgctcatgcatgaggacctgaggtcacctctctgaggggcccacagcctgggyccctgctctgaccctgcctggcactgtctcattcaggcatcttcatcccgagctgcgacgaggatggctactaccggaagatgcagtgtgaccagagcagcrgtgactgctggtgtgtggaccagctgggcctggagctgactggcacgcgcacgcatgggagccccgactgcggtacgggctgggcagctcagggcctgctgggggcccaggcctgggggcccttgtcgtgggatgctggggggtgcgtgccagaagctccctcaccccctgttggcttgatcccctcacagatgacatcgtgggcttctcgggggactttggaagcggtgtcggctgggaggatgaggaggagaaggagacggaggaagcaggcgaggaggccgaggaggaggagggcgaggcaggcgaggctgacgacgggggctacatctggtagacgccctcagragccggctgccgggggggactcaacagcagagctctgagcagcagcaggcaacttcgagaacggatccagaaatgcagtcagaaggaccctgctccacctggggggactgggagtgtgagtgtgcatggcatgtgtgtggcacagatggctgggacgggtgacrgtgtgagtgcatgtgtgcatgcatgtgtgtatgtgtgtgtgtgtgtggcatgcgctgacaaatgtgtccttgatccacactgctcctggcagagtgagtmacccaaaggccccttcggcctccttgtagctgttttctttccttttgttgttggttttaaaatacattcacacacaaatacaaattgacaggtcaaaatccatgaaatgagatcccccagccgtgtcctccagcccagccctgaccccttggtttctaccctggctccccttggtttctaccctggctcaaccgacccctgtctgcccttctccctcytgcttctgaggtcaagctctggcctgcgagcctgtccccattgcaaaggggagggaggggcagggagctgtctaccagctgaggtcctcccaaaactgggccgatgtggtgtgacatccccaccagcctcagatgagacgggccaggacgcccagccacagcaagccctgtccctttgccggatccccaaacactagagaagctctcctaacccaaggcggagaatgaaggtggtggcggcagaggaggagggcagcagctgagaggccagggacagggtgcctcgccaagctgtctgaggtctgtcccaggtggcccaggtggtgcaggtagaacagggtgaggagagggggtcggctcarcaggaggaggctgtggctgcagagcctggrggagcttttaggtgttgagatggggcagctctgaatcctagaccctggaatagcctgtcccttttctctgggtctcgtggtggagccatgatctgggctgctctcttggggwsactgggtggtggttacacagttgacctctgcctggctcccccttggtgcaactcctgcctccatcccccttgctggggtcccctcatccacttgagggcgcctgagggccaggagcagcaggcaaggagcctgggtctaggctaagggggtgtgtgcccacctcctccctgacccttaacactcctgtcctgcccagaccaacagagagagctgtccctgagaccccggagagaagcagctgccgaaagctgcagcctttccgcactctgagaccatgatcttcctcctgccaggggagagccacccacaggccatgtccagccccacttccctcagcccccagggcttccttctggcccctctgaggattccctagggctgccccgcagaggggcttccccaagctctgttttgaagcctgcaatgtggaaaagtgagaagtcagagggaacaggacaggtgcagccgggctctgaggccacacctcacacctcgctgttccccaacatcccctgagcagtgtgagctcatctcaccagatgagaagaggccctgtgcatttcttttgtttgtttgttgctgttttcccccacccatccagttctccycagcaaagcaaattccttaacacctttggtggagaatttcttacccagacttggggctgtgatgcccttcagtgcgtggtgagtgcagcgtgtgtgcgtgtgcctgtgtgtgaacctgggggccatcctggtggcctgggagcgtgaggagaggccccctgtgtgctgggtgagtggtgggtgtggggtcaatgcagtgaggctctctgggtgaggctcccaacctggcagtccccagcctcccagcatctgtgagcgtctgttggactttacagaagagcctcatccygtctgcccctcactctgccctggaatcaacatcttccgagtccytcttgggggaaatagcagagcccmacttarctccataaactgcttcccattccgcagcccagttctgattgttgaggtgtcgcgtcgttccaggtcccccagtcccctctttctcctgtcctctctctgtccttcacctccccactccagccccggctcagttcagggaaatgctgttccayatcagccctctgctctctgaggcagccgcgcctctgactcggagctacttgaaacttctgctcttgctaggattggagtctacctatctcttccatttgtcccagctggagttctggaactttcctcctcggggtgggggtgggggttgttaaggatgctggggggcctggggaaggaaggagttcagaggaagggtgtcccctgtcctcttgatgtcaccctccgctcctgggacacgtgctctctctgtctctgggtcttctggctgtgcacgtttgtgtgtccttgtaaatatgttttaggaagaaagcaaaagggactgaactagcctctggtaggattgcaggggtccagccttgcctgtttccgaagcccccacactgcctttcgcccyactgagactggtcccctcaaaaggtagacaaaacagcagctccctgtggagctgaagggcggcctcaaagtggctttttgttagacaaggttaaggtttcctcatgagcaaggttgcagatcggtccttcctcagctccttgatttgtgaccttgaccaaggggcctgccacccagcccctccagtgccctctcctcgatgcctcgctccttcctgcccccactcccctggcttaggcaggtaggggaattagggccatgctggaagaagcttaaccatgtgttcaaagaacggtttcttgcttgcttggtcctggaactccccttggctgccccaggcctccttggcccatgggtgctgggggaggtggatgtcagatctggtaggttgcagcagagaaaataaatgtgccttgagagaccactcagagagggtccaagggtgatggagaaggaagcatggcctgggagcttggaagggaggggtggtgggtggcggcatcttgactgccccctgttgtcccacacgtggggggtggtcaccccccttcactccagcccgcctgccttcagccttccatgagcttcacctgcttccaacttcactttggagggggtggggtccgttggcatcaacacggggaccctctgcttcaccaaagcccgagccctcagcccctggggagaacaaatggctgagctttgatacctggggtcgtcgagaggctgcgggctggcggcagtcccaggggagagacaccacagaaggagacccagacatcccgaggaagttcccagcagagcaaactgctttccagcctgaagcctgcttaaactgtgtgatgtgcaataactgagcttagagttaggaattgtgttcaagtgcttggatttccgtctgtagatttaactgctgaaattgtatctctcagtaattttagatgtcttttaaaaarttgaaaaacaaagtgttagactgtgtgcgtgtgcgttgatgggcactcaagagtcccgtgagtcatccagccctgcctttcccctgcgcccccatcctctcacgtcccgcccygcctccacttggggaccctgcctcgtgtcgtctttatctgcctattactcagcctaaggaaacaagtacactccacacatgcataaaggaaatcaaatgttatttttaagaaaatggaaaataaaaactttataaacaccatctgctggcaatactctgattattcttacccttggtattatttttcacgaaaacagcatttatggctgagcgtggtggctcacacctataatcccagcactttgggaggctgaggcaggacaatcccttgagcccaggagtttgagactggcctaggcaacatagtgagaccccgtatctatcaaaacaaaaaaattaggctgagaaggaggggcagtgggtgaggctaaggattgcttgagcctaggaggttgaggctgcagtgagctatggtcgtgccactgcattccagcctgggcaacagagggagactatctcttaaaagataaaaatacagtacagtacaattcagtggcatttagtacgttcgcagtgtcatacagccgtcaccacaatccaactccagagcattttcatccagggtatgagcttttcaaagacttcaaccacctcttagcaaacggcttgtgagaaaggtaaaaccagttgagacagcgccgctagtggagtatgtatcgggcccttacatgcttgttagcattatgattctaatttttaaatttttttttgagacagagtctcgctttgtcgcccaggctggagtgcagtggcacgattttggctcactgccaccccacctcccaggttcaagtgattatcctgcctcagtctcccaagtagctgggactacaggcacccgccaccatgcctgactaattttgtattttaagtagagacggggtttcaccatgttggccaggctggtctcgaactcctgacctctagtgatcctcccgtgctggcctcccaaagtgctgggattacaggcgtgagccaccatgcccggcccatgattctatttttttatgtatttttattttttattattttttttgagacagtcttgctctgttgctcaggctggaatgcagtggtgcagtctcggctcactgcaacctccgtctccccacttcaagcgattctcctgcctcagctgcccaagtagctgggactacaggcgtgtgccaccatacccggctaatttctgtatttttagtagagacagggtttcactctgttggccaggctgatctgcccaccttggcctcccaaagtcctgggattacaagcatgagccaccacgcctggccagtgtggcagaagaatacctaaatgtcttacttttatttctgggattatctgagctgggggactgtcgtcattattctgtgacttttcttctcttgggccttgccaacccctcactagacgtgtcttttaacaaattgtttgcggtgtggagggggatggaatctgggcacaggagctctaatctctagccctggagcttgctaactgtggccttgggccaggatctgctggatggatcacctgtggtaaccagcccccgtgctttccaaacagcgaaagcccccggtgccagcctgcagccagggcacgctctgcccgtctggctggaacgactccttagaaagggagcttttctgccattcattgtgtctcaatgccaccagcaagctcagacttggaggctcaggagctttctggaaggtggcgtgaggagcgatggggtttgccaaggggctgctcccagcatgtaggatgaaagggatggtgatgagaacagcggtttcggattcggagtggctaggaggagcctgcagcctgctgagggggaggccttctgaatgagcgtcttcaaccgtcagggaaatgttggcttttgtacctggcggattgacatttgctcaggtgacgggaagccagaggccagccagggccccggcttctggaacaatccttccattgtcaccatgtcctgtcaacctgggttcccagggttccttggcccaacagcaaacagagcattgccggggacaggcccaggtgtcaacctgcagtacagacgtggctgcggccgttcgggaaaccattgctggagcccagatgcgtgggaaccccctgcccaccccctccctgggcacagcaccgtcctcaaccaggcctccccatgtgcccaccgcatcctggcaccttgctttccctcagcatttagcctcctgggaacagggtctatgtattgacttctctccggtgaataactgggtcctgggaacaaatctgaaagaaaaaacccagactgcacacagagtcctacaggcagcatttccctcccacccgccacctttgtggagagctcagagaggtgagggggtgtatttgaccaaaaacaaacaaaaaccagaactttttatattttgagcaaaataggtgagggagaggagaggaaaaaacaaacatttctatgttcccttcaatgccctatgtcctttacattattattattattattattattattattattattattcagagaaggtttctcactctgttacctaggctggagtgcagtggtgagatcatagctcacagtaacctcagacttctgggcacaagtaatcctcccacctcagcctccctagtagctggaactacaggtgtgtgctaccatgcccagctaattgttaaactttttgtagagatgggggtcttgctatgttgcccaggctggtctcgaactcctgggctcagcctcccaaagtgctgggatcacaagcgtgagccagtccaggctgcgtctgctgttgaatcccctcagcaactccacgaggcagggatcaccagccactcagacccatttatggatgagaagactctgtttcccagggctgaccttggctcaggcaggggtgtgtggtggagccttggtgttgctccaggcctggctcactgcaagttcagctgcccagggctgtagccactcctggcatgcctcccgcactgagataatgcccaaggtggaaaatcctgtgttttcatcagtaagtcatggttgaatgtggatgggagcgtgggtactggggaagtacagaagaaggtaagacatggagattcttccaggacctgcttctgaacttgggtcagcacctctccatgggcctcagtttccccatctgtaagatgaggggattggactcagttgtccagtgttgtgagtctgtgaaaacgtgcacaggcaaacaaacaaacaaacaaaaaaacaaaaaacatgcacaggtacgagtccagaaaatgtcttgttaggttcgggattgtcttgctttctctctctctctctctctctctctcacattgcacatttggtgtgactctgccactgtttctctggaagggtgggcatccttgatgcacccctgtgggatgggtcagcctctagagaaagctgggctgacccttgaggtcaagctcctgctcccgctgcccatcctcttctgattccagccatgccagtagaggggagggtggatgccttccaagtctcccaggaatatttgcttccctggcgctggtggggaaggaggcccctccctgcactatctcctctcaatctccttattttaattttatttatttatttatttgttcttgagacagagtctcactctgtcgcccaggctggagtgcaatggcgtgatctcagctcactgcaacctccgcctcccgggttcaagcgattctcctgcttcagcctcccaagtagctgggattataggtgcacaccacaatacccagctaatttttttttgtatttttagtatagatggggtttcactatgttgtccaggctggtctagaattcctgacctcaagtgatccacccgccttggcctcccaaagtgctgggattacaggcatgaaccaccgtgcctggcctcaatctcctttatagtctatctgagggggaaaaaaagcgaaactatttttttctcttctactctcactctgtcaacacacaatacttcccctttggtcaccaaaatgtgtggggatttttctctacacaccaagttgttctccaggggacaccacttagctgtcccacattcaattcaattcctacactgcctggagagagtgacacgtcgtgcaggtcagggctcagtcccaccaggcacagtggcgaactgggaggccaaaatgggaggatgtcttgaggccaggaatttgagaccagtctgggcaacagagtaagacccaatctctacaaaaaagcaaaacaattagtcagatgaggtggcatgcacctacagtcccagttacttgggaggctgaggctggaggattgcttgagcctgggaggtcaaggctgcagtgagccatgattataccactgcactccagcctgggcaagagagtgggaccctgtctaaaaaaaattaaaatgaatttagcaattttaaaaagggctcagtcccacaagtctgcccccacctcagatgcccgtcaccagccccaggttctgacctgtgcttctgacctatgggctacagatcagggttctcatactccctcctcaggttcagttaatttgctagagccttgcagaactgagggagacacctttacccatttatggtgaaggatatttcagaggacacagatgaacagcccgatggaagagatgcatagggtgaggtgggtgggaagggacgtggagcctccatgccctccatgggcaccaccctccaggaacctccatgtgttcagctgtcaggaagctctccaaaccctgtctttttgggtttctatggaggcttcattatgtaggcatgactgatgaaatcactggccactggtgatcgcctcaacctttggcccctctcccttccccagcggttggrggtagttggttcccctggcagccagtccttatcctgagggtatccaggagccccccaggagtcacctcattggaacaaaagatgctcctatcactccagaaattccaagggatttcagagctctgtgtcagaagttcctatcactcaggaaattacaaaggttttgggctctgggtcaggaactgagggcaaagaccaaatacatatttcttcttatatcacgatatcacagtcagtgacaccaacagaggctgcgctcagtggggcaacctctcctcctccgcagccccagcctcctccctgactctgccaggcagctagctccagccaggtcctccaacactccccttgtcctggagggccagcctggggcctggcaacgcccagctgttcaacatgaagttgccccaggacccccaggatcaccctggaggggcccccatcaggagacgcaagacccctgggccagggctgagagggcctgttcacttgctgagctgctgatgggcaggtgacggcctatcctgcagcagttagagggcagctagggagacgtgggctcctacctttctctccctgcaccccttctccagcattgttcccagcaggcttgggactccactgaacttggatctctttggttttgttccttgtcctctccctctgctcacacactgggctccaaggagcccgttcaaccccagattcttggattcagaatcctgggatcatcaaatcccagagatgtcaaagctcatttggtctgccccttccttagagctacaccatccggccttgacccttggagatgggatgtccacttggctgggtttattgcacccttgctgtatgcaaggctctttgcttatcaggcttggagaaattgagttaggtggtgcaaaagaggatacagagggaaatagtgcccggcctgccttaggaagcccacagtccaataaaaaagacacaagaacacgtgtctcagtgtgatttttctcggggcaggaaggtgctttcccaagggttgcaaactctttgtgaaggggtgacggggcctgtgtgacagtagggagggctgggaatggtggtggtctgctgggtgcacaccgtgtgcagagggtgctgcagaccttgtgcgtgctatggctgggaggcaggaaaggattcaaatgaagactggagaaatagttggggctgaactgtccaggctaaagtctgccttctagttgggta

SEQ ID NO: 6807 - DNA, 95108 bp, Homo sapiens
ctctgccttgggcgacatctgtgttgtgttggctgtagtcagaaagatatgtgtcttaaggcaccagaaacttccacccattttgggaaagggatatttttctcaataaatagttatatggcttatttataaagccccaatcttaatgttctcatttaatctaaggagtgtaaaggaattaaactgtgcacattcccaaaacacacacggaaacatataccatgtccttcacaaggaaacagggtattctggtaagatctacattcccacatgcttaagacagtcataatttcaagtcagttgaaccagtatttgttcagtgcctctaatttgcccagtgttgagccacataggcacttgggagtttgaaagattctaggatgtggatgatgtcctcaaggtgcttataattagaaggcaaaactcctcccctagcaaacctcacctggcattctgcagcagaaactgtatgtgttctctgggggaaatcttgttgcaaaaaatatttatygatttgcatgaaaaggtgccaatagagctaagaaatatttttagctgtattgtgtttgaccctttgtggacttgtgaccctttgtggacttgtagaaatttcagtgtttattcttcagggtcatttaagacaaatggtcatgctgtttggagtgacaaaaatggcttgtgggacccaaagtaataaagaacagattgattctattcttttatagattggtaattcttagactttgctgcacaattgttctcctggggagctattaatattacaaattccagtgcctgggttgagtcaatctctggaggtgggactcaagccccagttctttttaaaacttcccaagtaattcctaagtgccaccaagtttgagatctagtgatacagatgactttatcaacaaccttttttttgttgttgtttatttgtttgttttagcctaagccttctagggtgagttttggaatgggctttttataatgatgggggtgggtgttgactaaagaactttcagctttctggaagctcaccctctgttctctgtactagtgaactcagtgtagatggaggtatgctttctccctttccaacaaacctggtaatatgatgccaagccagtcactcaaccatctatgttacctaaggttccctgaaccttgagtgtttttattacagcagcccaaatgttctgaaaatcttgattatgtctcttaagggaaggtagttttataattaattacatgtgtcccttgaaattatttttacattgtctgaaacccccatggaagaggaagcccattcttggtgtacttgcagctagtagaagtagctcattaaaatacaggggttactcaattcctgataactcactatagattttttttttttcagacagggtcttgctcactcacccaggctggagtgcagtggtggtatcatagctcactgtaacctcaaaacccagggctcaagtgatcgtcccacctgagcctcccaagtagctgagattacagttgtgcgccaccatgmctggccaatctaaaaaatttttttagagacagaatctctctatgttgcccaggctgttctcgaattcctggcctcaagtgatccttctgctgtggcctcccaaagtgttaggattacaggtgtgaggccactacccccagccacctcactatacattcttagggttggaaagtattttcaaaatactctagtacagcggttctcaaggtgcagcatcagcctcacctggacttgttagaaatgtacacgttcacgctccacccccagatcttccgagtcagacacagagatgagggtgtaggtggtggtgaggggtgggcccagcatctgtgttttaggaagttctcctctccgggtgcccaccaaaatttgaattactgctgttatttcaccttgtcagaaactgaggtaccccagtcctcagatctgtctctgcaccatggccagatcatcctaacttttctgtgtcatgaataactgccttaagaaaacacccaccatcctaaaatcataaggcataaagaaaccttaaatgttgtctcatctgaccctcccatttcacagatgagaaaactaaggtcgatagggtgacatgaagtcaataagatgtagagttattggtgacagagcttttggtctacttaaaaccgacacagtcttcctcccccactggcccacattgcctctccagttttatgtggacttctagtatttggctgaaatcacgtcagttaaaatgtctaggttaattgtcaggcaactctagaaaaagaccaacagaattttaattctttaaaattaatccaaaattctttcatttcaaattggcttgaattttataactgtctttgtacatttaatagaaaaaaatatcggtgatgtaaactgctgaaaagaaaattcacagaacatggggaccagtcctggaacataggtttcatcccaacatcgtgtagattaggcacttaacagcgcctcagaggcacacactgaaattgcattttcttccgatttggttaaaaggaaaaacgtgacaagaagtctgtttgttgaatactttacaattttatacttgatgtggttagtgatatttacataattttgtccgtgttcaaagactgaatctaatccacattctctgtagagcttcatctttcaaagcattgtagcaatacacagggaacattaagccaagaaaacgaagggagaacacacagctattatctacatacacatatacatggagcaggcatgtccatggataaatttttttttggttttttttgtgggtttttttgagacagagtctggctctgttgcccaggctggagtgcagtggtgtgatctcagcgattctcctgcctcagcctcccgagtaggtgggactacaggcgcgcaccactatgcctggctaatttttgtattttttttagtagagaccaggtttcgccatgttggtcaggctggtctagaactcctgaccttaagtgatccgcctgcctcaccctccgaaagtgctgggattacaggcgttaagccaccatgcctagcccattgaatagaagtgtttattggttccacacacctaccatgtgctaggtattgtgatgtggtgtgggacacatatagttcctatcttcgaatgatcatgggacagtgggaaagtcagacaagtgcttcagtagacaattatgagagcaggtggtggagttagaagagagtacagttgaggctgatggagcagaagggcattctgaagatcatgaaagggacatcagtgcacactggatgggagcagaaaccagagaaggctgcctggaggaggtgtcctgtgagctacatttcaaagtatggtagatatctaggtgaaggggagtagggaggaggttgtgtagggagaggggccagtatatgccaaggcatcaatgcttgtgtgtacattttctatcactgggccaggattgatctataaatccctatatatttctttgtgtgtataaacattagcaatttggtttcttagagaaaccaaatgctttgcatagcagttttaaaatatacatttcgaaaagctcatttttccattacaaaagactcagatgttcccaagaaaagtttctcagttgagaggtcaccagatcttatgttaccgagaaaatggaaagatttcccctaaccccagaagtcaaaccagcttcctcaatttgagactgcacaaaaccaattaatttttgcccattgtggattttcttaataattgcatctccgacaaaccaactcctgtcctaaatggatttgagccacatttcactctgaaagctgtgggtccatctgggaaatgtctttgtagatgagagaattttataataaagtatttttggtatttcatttactaaatcttcagggatataggtaagagagcctccgtgctgaactgactgcctaacagaacaaggttagagagaatgaaattatttcatgctgtctggcctgcaacacatgcctctgaacgaagccatatacagtcgcgggtcgcataatgatgttctggtcaataacagatggcatatacaatggtggtcccataagattataatactgcatttttactgtacttgtctaggtttaaacatatttagatatgcacaaatactcaccattgtgttccagttgcctccagcattcagtacaggaacatgctgtgcaagtttgtagcctaggagcaatagggtatatcatatagcctaggtgtgtatgtacactctatgatgttcgcatgacaaaattgcctaacaacacatttctcaagacatgtctctattgttaagcagcacatgactgtatatataacaatggtttctttaaaagcactcccaggagtggccaggtgcagaaatagctgaatttgtgagcaatgataatgatagttaatataattatcatattttccagagcacctgcacatcacgtttgatctttacagtgagtggaacagacattacgatctccatttgacagatgaggaaattaaaccttagagttatcagatttcaaaggtgaagggaccttagagatcctttcatccagctttctcattttacaaaaaaaagaactccctgagatccagggaaactaactgacctaggatcccacagggagtgaataagggctgttgggccaggcccaggtcttctgatttctagcttcctgattttgcactccattgcgctattctcagtcttcagtgtgttagaggaaacttggtaggttatgcatttgttcttaaggagaaattttgttgatatcagtcctaggcactattttataaatgcacacatgtggaaaaatcccttattttcctgctttttttctatatatagatacaggcagatacacagacagatagacacaccacatgtggatgtcactggggagatgaaggtgggattgaacttagcagagtctcaaagggggcttcagctttatctgtcaaatattcttttattaaaaaattttgaagcaaaatgaccattacagtagcatttattcattttggataatgggcactgaattcataagtgtttgttttcctcttcatatttctgtattttaaaattttcaaaaaaaaccaaatatggatattaaaaataaattctcacctataataccataccctcattttataaaaataaagaatattttcaaagaaataaaaatggttcagaaggatggaaagaaaactatactatgggactcgttagttaagttgacattaatcctctgctttaagtctttcctgtgatgacactagcagaatgtgtatcattttctctgcatttgctgcaggatcagttctctttggcaggttttgagccgttctaataagtccagcatgaaaggcaggcctctcgtgtcagttctaaacccaccagctgccccattgtgactgcatagtcccctggttctgagactgtgctctgcctgataagcgacgtacggagcacagtggactgaaagcccggggatctgataccaaacatgttagttaaactcatgtttaactaacccaaactcatgtttaactggcccaaaggaagtaggcccagaaatgtggtttttggagctccctttaatgaacgtgtaaacagaggatagaatattggccttacagtttaaaaaccctccttcaagtcccagtcaagtcccttattcactggatgacctcacacggttcatctgatctttcttggtctcagtcttcttactatagactggaaatggtcatatttgacttagctgtccatatggctgttctggagatgagacagctaatgaagtgagaacactcattaacacaccaactgaaaaacacaaaacaaaagagagatgataggattatattgctgttatgaatcattccaagaggtgtcatggtgatatgaatcatcatatggtaatgtcatggctaaggcccaaacacagaatagcagcattgacccagtagtctcgaaattagtcacagaggccaagctagtgaagacccagcagccctattgttatcaagaaagagcactatccaaaaggtgtgtggcctcatcttctccttgcaaagagagaattcatctggtatatgttgataggcgtgtatccgaccacagctacctccatcagccctgaggacagaggcagcctgcattccagtcccagctcttctctgtctcggtgtgtgacttaggcggtttcacagaggacgccaacttcattggcttttgcggttttttgtttgtttgttttttgttgttttctttttgtttgttttgttttgtttttgtctgtagaatgagtgagttaaactaaattgtctgtaaggcctcasctcactcttaaagtgtgatcactagctagagtttgaactttagccccaatatgactgttgtgttgtcattgtcacctttgtaacctgacattcaggaatgtccctctctagttcatattctgacctagcttctgaaagcattatagcagagttgagaatttttgatctaggaaagataaatattaaaaagaaattcccaccaaaataccataaataaggaatgttttaaagaaaaatggttcagaaggaaggaaaactataatgtagttcttgttagttaagttgacattaatcctckctttgctttaagtctctcctgtgttgacactagcagaatgtgtcataaagacatggaaagatcataaattctcaactctgctctaaagatctgaccttcagcgttgcatttatttggccacacctttatagtgtggtcatacctagaaaatattttcttgcctggtcatcagccctctcacctcgattactttctatattttagcacaaaagaagaaatggcgcattcaccactcagccagttgcactggaagtgaatttaaattccygaactggttatcttggaagatattgtgcttattgcagatgtggccggtgcatgagtttaggcactaccatgctctgggctgtggttcttggctcctgcttctggatggctggacattaccaggagagagcctgctgatacatctacgcacattcactctactgcacttcagctgtgtccttgttattccacagccctttaagtcctggttcaccaaccagatgttaagactctcttggatccctcaaatcccatccccatgcctgctgcctcctctctcagcagttgcccactccttatcttctaatcctcttttctccctatgatgatgatagtgaccctgtagctccaactactgggtcctcacagtcagtccactcctgcagaggaaactggagggtgaccaggaaccttcaagtcaatgtgggccacagacaggaaccgtctttaaaagatggttaaatgcccgtggtttacgtaggttggctttctttaagcaaataaaggaaatgcattgcttcatgtccagcaaagtacagggtggattcaggagaagctggctcaaggcattcctaggaagtcatcaaggagctgcctgtacctctgtcttcaggccagcatcttctgagttggctttattctcaagcaggctgtcattaagtgatggcttaacaacaatttagcaaccatggcatgacagagaatcatgcctgatagctctaacaaagtatccgagagtgttcccccatgagccaatcactgttgccagagggatgtggttcttggactggccaggtctgagacacgttgcttgggcccctatttgtgcagaattggcccctgactacattcccagagggtctttggatgtttggtcasatggtctgtactctggggggatcaattcataccagcaaggtccagtcagcccctacacctaccaccgcctctctagtggaagccacttttgcatctaattgtcttgggaattgtgttggttttctattgctgctgtaacaaattgccacaaatttaatggcttataataacatacatgtattatcttacagttctggaggccakaagtccaaaaccagcctcactggactacggtcaaggtgttagttccttctggaggctctaagggacaatctgtttcctggtcttttctagtttctaagaggcttcctgcatttctttggctcatggccccttcctccatcttcaaagccagcagcaaagcatcttctctcctctctgacttctgtttccatccttatatcttctcgctgactctgatcctcctgcttcygtcttagaaggactcttgtgattacattgggcataccaaattaaattcagaaattcagataatcaagatctttaattcaatcatgtctgcaaagtcccctttaccatgtaagataacatattcacagcctctgtgggttagaatgtgaacatttttattattcagcctactgcagggattatccactcaatttaaaaacctgaacttagacagagaaagagtgtactgaagctcctgcattggagtgggaaattgtagatagtgacctaggaaggtgactttgtacctgcttgtaggtttagttttatttgcttcttgggtgtatttagaytgtcctttttgagctgtttgtgggtttttctccacagaattgggtactcataaaagaggtgtccatattgcctcaaagccaccagattctgatgagccataccccttatcttccttcttcattttgttcacggcaattactttgtgcccataaagtgggaggcagtgtgctgaggaaatacaagattctccaagacatactcctttctcttgtggaacttatgtctggtggagtagaaaggcacgcacgcaattatttttaacccaaggcacaggatgtgctgagtgatataaaagtgacaaactaaggagtgggaagacagcaggagacatcagttccagcttccaggggtgtcagatcatgcaccccaatttttggttcagaaatatgatcactactatatgcacctcaatttcaggttattaactattgcrggctaagaattttagggctttaaaaatagtatgatgtgttttttcttctttgtctagggtgtttggatgaaagcaggtgctcagctctgatgattcatgtgaaatcacttctactcaaggttgactaaagttgggaatgatgaaaatttcctagtcaaagcaaaaattaagaagaaaacctggttagttttcttattttttgaggaatctgaatgggttaacgtctgtaacctgggccatactctgaaaaggacaggtttcccatggctgacctgcaaatacccagcatggctggctttcctagttggaaagcccttcctcacgtgtcctttcagtggcaaaggggaatctctactaagagctccctcctgcccagaatgcaattttagaaaatagagctgacttctctgggaaaaacaaaaccaaccttgkcttactctggtcatggaaaccaacttggcacctcattatcgccttgttagcaagaacaggctgtatgatggacaaacctgggaggaagagttggccctgtgtggccacggttttgagttaagcttaattgcttttctaaagctcagctrcttaatactacacaagtcaaaatctatcatcagactcttgaccatccattctcctcttccttccgtattcttgcctacatagacattggtcrctccccattctgctgctgttgaatttgtgctgggtcacccagggacccccaaggcttgtttgcaaccagcccggctccccaaaggagaacagggctgtaactacctttaactttcagtgccctcttcccccatattttaaaatgcagccagcctgttctgcccttggagcatagcagggctgctggctggggaaggtggtgtctttttaacaacttataggcaatttttgatttttcatgcaaatgggaaagaataacaaaggcattttatctggctctcaaatgtgctttgtacttacatttaaatgtgggtgtgcctgatgttctgggaactcccttccaacaagacagtgtggcaacccatgtcacttgctatgtctcccttttcctcctcagctgagctagctcccagcctctctcgtttttgttccattatcattggatttttactgtacagaacctgtgacagtggagactaaggtgtcccagttgtgcagtgtctaccctgtactgcctaagcatgcttattgtacagcatgcattgtttatggcaactccaatttccagttttccagtccccttcttcccattcaaatgtcccagaattccagttcatcaacatcctgaacatatttcctgatgacacccacttttcagaggggaatttaaaacctggaaaatgtggtcttaaccaaagattccctccctgcctgtggtaaccacatatcccagatgttctgggaaagtctttccagtttccagaccatgcacactgatttttggtccagaaaccactataaccaaccaatataggtcacatgaaagacacatgtcagacggacaccctttctgcagtaagattcggtgagagtctgctattgtcccctacctcaaattcagatttttttacttgtaattttttggttattccttatrctagttaggtttgagagctcagttgaagggaactgtgatattgtgagatttggtcttcctcaggtttcctagcataaaactccaaaagtctttggaatcggataaatatctttttgtatgctaataagctgacaaatgtctggcagccccttaggtatctttaggatggggtctggttactggaaagaccacagcaggatggaagggttgggactttcagcctcacccctaacctcagggaaggagaatggggctgaaagtagagttgatcaccaatggccaatgatttaatcaaacatgcctgtgcaatgaaacctccgtaaaaacccagaaaggactgggacatgtggaggttcctggagaggggggtgcccgagaggatgtgggagctctgtaccccttcccaaacactttgccccatgcacctcttccatctggtgttcattggcatcctttgtcatatatcctttctaataaaccagtaaaactaagcatctccctcagttctgggagcctctctagcaaattagtctaattctgatttacagccagttggtcagaagcatgagtaaaacaacctggggcttgtgattgacatccaaagtggggggacagtcttgtggggctgagccatcaacctgtgggatctgacgctttccccaggtagtgtcagaactgaattggcagacacccagctggtgtccactgcagaactggttgcttgcttggtgtgtggagaaaacctcccacacatctagtgtcagaagtggttcgtgttgtgagagtataggagacgctgaatttgtttgtgcctatattcagacaggaagacaattcatgttacttttggatgtgaaatgaggacaaggatgaaaatgtgtttggcacaaatgtaaacacgattcactctgtaggcaattgttaagcctgcctttttcacttaacattagagcatatagattttctcatgtcattaaagtggttttgtttttgtttttttgtaacagagactttggcaaattcaagataatgtttaccattggcaatcacggggaagggtgaggtggggggagcacgtaaccaagggagatttatcrtattggaatgctctctgtcttaagcttggtgctgtgtactcttttttgaatgtcctaaatgttacataataaagtagaaatttgaacaccaatagtaatggttacttaatattttattatgttggtgtatcataatttcctcagttcaaatcccatctcgctattgttggatatttgtaattttcaactttggactcttaaatagtatagtattaagcatctttgggtatcaaattttgtctgcatttgagctcattttctcagttttgatttatataattgaattccagggtcaaagaatatggctataataaatgcattttgttagactatcttttaacaaagctgtatgcgttgattatcattgacattgtgcctattctactctctctccaacacggagtgccattttaaaaaattgctattttgctaggcaaatatttgttttgaatggttttagtttatgtttctacttactagtgagattgaacgttctgtcatataatttttccattggagtttttttttttttttttaatgtgtatgtgtgagcacaggtttttgcagattcacttgtatgtgggaccagtgtgggaaggtcttgtttatgtgggaggggggaccacagataacaaagaacagccccttgcccccctcattgaaaaccagctgtgcatctagacctctgtcttcccacagtgccgccaagctcctggacaagaacccattctcggtcagtaacccgaaccctctgcttccttcacctgccagtctccagctggctcaactgcaggcccagctcaccctccaccggctgaagctggcacagacagctgtcaccaacaacactgcagccgccacagtcctgaaccaagtcctctccaaagtggccatgtcccagcctctcttcaatcaactgaggcatccgtctgtgatcactggcccccacggccatgctggggttccccaacatgctgcagccatacccagtacccggtttccctctaatgcaattgccttttcaccccccagccagacacgaggccccggaccctccatgaaccttcccaaccagccacccagtgccatggtgatgcatcctttcactggggtaatgcctcagacccctggccagccagcagtcatcttgggcattggcaagactgggcctgctccagctacagcaggattctatgagtatgrcaaagccagctctggccagacatatggccctgaaacagatggtcagcctggcttcctgccatcctcggcctcaacctcgggcagtgtgacctatgaagggcactacagccacacagggcaggatggtcaagctgccttttccaaagatttttacggacccaactcccaaggttcacatgtggccagcggatttccagctgagcaggctgggggcctgaaaagtgaggtcgggccactgctgcagggcacaaacagccaatgggagagcccccatggattctcgggccaaagcaagcctgatctcacagcaggtcccatgtggcctccaccccacaaccagccctatgagctgtacgaccccgaggaaccaacctcagacaggacacctccttccttcgggggtcggcttaacaacagcaaacagggttttatcggtgctgggcggagggccaaggaggaccaggcgttgctatctgtgcggcccctgcaggctcatgagctgaacgactttcacggtgtggcccccctccacttgccgcatatctgtagcatctgtgacaagaaggtgtttgatttgaaggtgagttgtccaagacaggctgggagccacagcyaraagcctgggcaggcctttccccatgacccaactcacgctgccaatgggcaaggaactgttgcattggggtaacagaattttgccatcagtattcttgactaaaatcacaggtattaggacccataggaatttcagaaatgtatcaggaccagtcccttgcttgaaggtgagtcagaaattcttacacactttttctagatgagaaagctgaggctgagtaggggagcaaaggaccccacctgggttgcagagagaaggggctcaggagtttcctgccttctcgtggagggcttctcccccgtagtatgcctagaatctactgccccttgagtacccatattgtagtgagttagaaaagaaaaaaagcagaattttggatcaggggaaacagattaattcccccttgggacctagacaaattattatagagagcctcagcttccccatcagcaaaatggaggtagagtctcgtgacaccttcccggtggttgggaaatgctttgagttcctgcaaacagaggtatatgatagtataatttccccccaaaaaatgtattgcagatgcagtgaaatattttgaagcaataacaattataacaaataccatatattaaaccctttctgtgtgccagcagtaactcttatgaggtagatattattatgattttcattttacagatgagaaaactgaggcccagagagatgagatgacttactcagccccttctccccgccacctccccagcttgaaagtggcagagtggagattcaaatgtggccctgaccctttcagagcctgcaccatttaaacactgggctgtcctgcctcccatctctcatcctgtccaaaagcataataatgtccttgcagagttgtgagtcacactgcagcatgtcattcacctctgtttgggtcacaccatccaagtgcatccctgtgacccagataggacatgccctctgacctctagtcttgggaggggactagctgacacggggaggtgctcaaggattttgtctctcatgaaccttttctaaggctttgtaagtcactgtgagtctacctgccagattctcccaactggatatgaaataggtggggtcttcctgggggaaaggagaaggggtgggaggtgggaggtaggtggtgggggcaagggtccattgagaggggtagagggaatccartttgtgagtctgggctcctgttcaagatgggcatgagatgtatggatgaggagctgatggagcaaaggctggatggggaggcaggaacagtgggaggagcctgggagggagagaggaagggtggagggatgtgtctgcaggggtggtccagcctctgggcgctctgtgctccctgcctgaccagtgtctctgtgctcatcctttgccttcccatggactcagttctactttggtcacttttctttccttctgacctaggactgggagcygcatgtgaaagggaagctgcacgctcagaaatgcctggtcttctctgaaaagtaagtgctgttcaggaggacaggctcatgcrtaggctcaacacatattcactgagcatttactgtgtgtcacacgctgttttgagtcctggggcaatagcagagaccagaacaggcaaagttcctgccctcaaggagcttgtgcttcacaggggccagrgagatrataaacaaaatgaacaagaaaattacagcatccctggtggtaaatgctaggcagaaaacaccaggcagaggccggaagtgcgtgtgtgcgtgggcgtgtgcctcccttttctggctttcatttttttcattgtagtcaagttcacatagggcttactattttaaatactttgaaaatactttgaagtatacaattcagtggcatttagcacattcacgacattgtgcaaatgttaccactctctagttccggaatattttcatyactccaaaaggaaacctcatactcattaagtaatcactccctattccccctaagccagcccctggcaaccascaatctgccttctgtctctayggatttgcctgttctgtacttttctgtaaatggaatcatatgatatgtggcctttggtgactggctttttcttttttacttagcataacattttcaaggtacatccatccatgttgtaatatgtacaacctttctatgactgaacaatattctattgcatgtatatatcacattcttgtttatccattcatcttttgatggacatttggattgtttccaccttttgactattgtgaatagggctgctaggaaggtttggggacagtttttgtttgaacacctgttttcaactatttgggggtctgcacctacgagtggaatttctgggtcacatgctaattctttgtttaacttmttaaggagccggtttccctttctcgccctctccagtgctggcatccggtgtatacttggttcggcagagggaacattgtgtgcttctcccaacagcacagctgtttataaccctgctgggaatgaaggtgagcaaggccctacaggtcagcagcttgaagcagaagtgggctacccacaggcacattatgtcctgtctttaataaccaggacttcyctgatgtccccttmtcacggatgtagaaagcaaacagatcccaagacactaaaatgcattgggcytgctgtctgggcccatcagtattctctgagatacttgagacgtaaagctttgctgattatcagcatgtccagaggtacaatcatgccaatcactaataatatgtgaaggggaaaggttcagttttctatgcctgcttatgtcctaataatgacttttgatgttacattctgggttttcactgactttgtgtaattcatcatttagattatgcctcaaatcttggaacatcatacgtgcccattccagcaaggtcattcactcagtcaagccccacatttcctttggcttctgtggggacaactgtgagtayggaaacattttctctagaaattaatgaaaatgattattagtttatttattwgtttgtttatttgagacagccaggctggaatgcaatggtgcaatcatatctcactgcagccttgaactaactcctggtcccaagtgatcttcctgcctcggtcaaccaaagtgctggaattacaggtggccaaagtgctaggattacaggtgtgagccaccatgccctgcctcaaatacctctctgtgtgccagtcaccctgaaatgcttgttgctttccccagcactgtgttcttcatgctcagtatgcacctgacatgccacaggctgggaggatgttaacactttttttagtggagagttggctggcttttgaggtctagacccatttatacctggtacccttcaattttccactctgggaattacacttctctagtttccaagatgacatgaccagaagtgaggtgagcatgtgactcaggcagccaaggagatcatcacactttctggccatagattggttcatgaatggtgtatgcctgtagtcgcagctacttgggaggctgaggcaagagaatcacttgaacccgggaggcaaaggttgcagtgagccgagatcrcaccactgcactccagcgcaggtgacagaccgggactctgtctcaaaacaaacaaacaaaaaaaccattttctccattgtcattgttgttgtcaagcgtttgtagtatcacctgctatatctgggcctagaggtgctgatctggctttgtgtcattcagaaaaacaaccccagacagaagtgaagagctgtttaatccagttcatctagtattgaaacacatgayttaagaagcagacataaatccttaaaattcaaggcattcctggactttctagcattcagcgctggcttagaaaaaaaaaagttggagctttttatgtttttttaagactatttaatgttttatggaagtagattatttcctatgagagggtaattttgaagcttgaaccagaaagtgtgtgaaagtaaggactacgcaccagtagcatttgttggccccttgaggaactggtttgtgctgtatgatgtttttgtttgtttttagttttgctgtctctgcaacatacattttcgtcctccaaagctcctaagcttcatctctcctttttcaccaacggtgacagctcctcttctctctggggtttcagttgttttgtgccaccaccctacacccccatctgacctcttcttctcccctgggcaggagaaaggggagtgggaggaaaactgactgtaaaacaaatgcatttgtctgaaccctgctggagggcacctgtttgtgtgccttagcctgtgcctgtgcttttgtggtgtgagttgctgcagcctctttctctcttctcctgcgagtgaacacaagctcacaagagcatgtctccacgtgctgtcccctctacgtgttggcattgcaaagcatcaggccagtaagctgtgaagtgcagctctcaggctctgaggagtgagtaagcggaaaagcgaggtggttcatgatgagacgtgaggcctgcctgagcccaggcttctgtttatttgtgtgtgttgatctgtgatgttgaataggagaagcgcttcragagagcccctgtctggaagcccacattttggtgaaagagaattttgtggtttccctctctgcactctgctcgctcagagccatgcccaggtcaatggcagcttcgggtcagtcccaggagactgcaatggctagattcagtgaggcctgtcctctgaggtcagattcctggtaacatgaccttgtgtcctgatgggggtgtgggccatggaggcacctctgtgctcacaaccctgccctgagaccccactccaggcactgaaggggaggaactgtgaccacgatgggggaggctggattgagtgtcaggtgggcagggggcagggcttgtaaattgactccaacctggggtctgggtayggggaagagatggcattaactgagcccctccataaaggggggtggatggggagaggagagacacaggcaggacattctgcagtctgtcccaggcctcttccccaccctccagcgctgcccattgagccagagaccctttcctatggacttggctctagggacctaagttcaagtcctactttgggagccacttgctgtgtgtctccaggcaagtcactttacttctctgaggctctgtttccttaagtgggaacaataatgcctttggaagataaagtaaacaactggatttccatccagcttgtgtaatttattgttttgattattcctcgaatctcagaacatcccatgcagctctgcagcccaggcttctggttcagtggccagcgccagacagtgggagcaaggcttgggatagatccagtattgtcctgcccttgtgaggatcagatgagataatatcagggacaatgatttgggaaccgtcaagtacatatgaagtaaccatggctgttcttgagtaacgagcgcttttaacccattttggctgtgaagagtcagggggaaacccatgctgtctaaggctggctctgtctgctggccataggattttgtccgagtcttggtatcagtgttccccttacacaaatctgtctagtaatacccagggtcacacttgctccaccttagagatgttttgaggttcccatggatgtacttttaaattacgtaccagtgggcaagcacaagctatctgatgatttgtgtgttgattctaattaattcctcgaagctctgagtgccacttcctccgaacacctagagatggggagtttatctggcttgagcctggtgagaagcaacgcaggaaacattttgctaggagctaggaggggacagagacctaggggacagctctctgygaggagctaggaggggacagagagctaacattttgggagctargaggggacagagagccccagtcattgtaggatgataataaaaacamcagccaacatttatatagtactcaatatgttcttagcatttttgttttgtattagctcatttagtcctctagacaaccccatgaggtggatactattattatccttattgtacagttgggaaactgaggcctagagaagcttagtaccttatatgaggccacatagctggtaaatggaggtggtgggatttgaacctaggcagcctagctctggaagcctcatttgtaaccactaagccctgcagcctctctgcgaggatctgaggggtctcttccttgctgtgatcctcctctttagtaagcccctctcacctccccctctccctaccccacaagccgcttgggagkttctgaggctgcgttgcaggtgacagggacttctctggccttggccacccatggagcaagatgaagaggccagccacacctggtatccacattctyctgcaccctgacagcatctgccaagatgaactcagatgtttggaggccttttctacagacccagtggaaggggagagtcagcatttgtctggttttatcattataacctctgtgacatcttgctggtcacatgagcctcctcaagcctatctgagggacaaggacaaagcctgccccagccaacccytacattgtcagtggcttgatgttcattcacatccttctgtcagacgctggtcccccggtttgccattgccagcatatggaattgaatgcaggtgtatctgtcttgaggaaaacctgaaatgcgagaacattgacatttgaagacaagctgagaaatggagaaatgattaatccactcttgaaaaatactttgcaagtctcctttaagtagcagaagagtccctcagagaaactattgactttctttctgcctacaaacactgacctccaaagatatcaccccaaagataaggggtgattactctgttgccaaaggatatttttccagtttccaatgaatgcccagtgagttgtttttgcatatacatttmtaatgtttttctgcttacaaaacttatgcttattgtgaaaatgcaaacagaaaagaaatactgaggggaatgaaattccccggttgtctccctttcagccctcacagagatcccattttcctccacaagtgaggtctggtcctgcgccagcactttgtatgtctgattccatttacatgcatcttttcagaaacacttttttttgagtaaaaccaggaacagccaggatcctgccactgtctgatcatatcactaatgtctgtggagcgaagagcagttactgcctctaaagctccctgtttttaagcaagagaagaccaaagtgacacggagctctggaaatgagccttcagattatatccgaactgccacaaaatctaaaaggaccgcaaagaccatctgccactgccaccaagcccttctggggacagacttggctgcatttaaacttctcccacctgtgttggagtctgagtgtttcgttgccttgtttgtttatttatttttgtttaggtttttttttttctcattttcttttcttttcctttttattgttatttatttatttatttatcgagacagggtctcgctgtgtcacccaggctggagtgcagtggcatgatcatggcttactgtaatctccacctcctgggctcaagcgatcctcctaccttagcctccaagtaactgggactacaggcatgtgccaccagactcagctaatttttggagagacagggtgtcgccatgttgcccaggctcgcgtgtttatatttgacagagacgggacactgcactgacagttgtatgctgtgtttgctgttggtagggtgatttgtgtctgtcctcagcccctcccatcccactctagggtccccagagataggtgttcactttcacttaagctcctgccatttgaggccaggcactttctccttggctgactgagtcgtcataaacagagtaatcaggtttctggaaggggccttggggctttctcagcctgttagtagtttttgtgtacctgcccgaggtgcactttctctgtgtctgtccctgtaaagccaccttgcagtttycacaaccatcttggagtttatttagtgccagtgtcacagatgggccaccctgacctgggatgatacacatcgtttttattatttatttctcgccaagaccctgcacattggggaacttgtataaataaggaaatggaggctcaggaaaatagaaatgtctgtggaaggccagaggtgtaagtcacaggctgcaactctgattactggctgtttctggaacaccawctgtctgccctggccctctgaatgcatggcttagagcgctctggtctcctgacttctttgagcatgaggactagtaattgatgtggcatatactaccagccgcctccccaccattccagctctgtcattgctcctgtccctccagcaagggccaccttgtgctttttcaaagagagcaaagaggaggagacaggagacctgggtaggttttgttttggaatttgttctttttacaaatcttactttttcttgttggaaaagcagtgtgaacattgtgtaaacaatcttagcagtaacagaaatataaaagaaaagtcaactttgcagagaaaacagaagttaaatgcttttgttataagtatatatctctctagctagtgtatgtgtacatgtttcattagtaaaagtaattttttgggcacaaaccagataacgtcatacaatctgttacacaatttgtttttttcacttaacataagctttcaatatatatttaaatcgatttctagacatctttccacatcagaacgtaaatagttcctatcttattgtgtaacttcatttttgtatttaccttaatttatcaagtctgcgattgataggttttttttcagtgacacctgagttttaatcacaaatctgccactgtttaattggccacagattaagatccttaacttctctgaggcttcagtgtcctcatatacagcgtggaccagatgacctcccaattttaacgttttgtgactctacagtttccagggatgttgaagctgctaaacaggtgaatcgtccaagatccgtaggcaatcctatggatttaccagtaaaagtaaattcactctgagtcagagctaatatgctctataaaatatttgaaagcatcaataaaggcaactgtgtctaccctccaagttaagccaagatccatagstacggaatttgcaaccatttgctatctgcatgataggttcaaaatcaacatcttgctctctgcataacaggttataaatcaacatcatgagagataaatatttgccatatctgctcttaggcatgtttagaacaaaaccagcagaggcccacagactctgtgccagataacattagatcacatctgagacagatcaggctggagcacagaaatcgtttactgaagatggaatstacactttgcagctctaggaggcagtttgagagacctctctcaccctgcaggcctgttgccctaagccatatttttacggcaactctaagttatttgaacttgagcctcttatttgaactcgggcctcttatttgaactcatctgtgaaggctatttctacctgcaccaaggggcaatgaaaggtcttagaatcttcatatacaagtctgtttgcttcttttgcatttctccccagctacaaaagagttgagggtcagttgagaggtctgggacccagccatatgaacgatcaggagcaccatctggttttaaaggtgcagcccccgcatgtgaaaatgcacagcccaggcccccgatcccatgtgggggcactcaaggtcagtgctggcttgcaggcaggctaaagcctccctgaggctgaaaaaggatgattgtccctttagcttggtaattcaggctttagtcacacccctgcaacttagctctcttagagatgtgacctctgctggaaagttttcagtgcacctgtcttacgtgtggctccttggcactcagcagacagagcccatcaacaccttgacctgcccttctcccctacagtatgtcttttaaaatttatttttggtaacttttaatatatttcaaacttacagaaaagttaccaaaaaggtataaggaactcccatataacttttgtccagattaatttcactactcctttatattttgccccatttgctttgtcattttctctatcttcctctatctgtctatctatctatctatctatctatctatctatctatctatctatctatgtatccatcatttgatcagctgtgcattttcccctaaatcattatttttagagtaggttggtgacattgtacctcttcacttctttttcagcatgaatttcctaagaatacagactttctcttacataatcacaacaatattttttcccaatgcagaatcattgtaacacatcctttaactgttgggtggaggaaggagataaacattatttacaggagcctgcataatgccaggcattgccccaaagcaccgtacattcacggtggcatttcatcttctcagcagtcctgtggaatcaatttttattacccctgttttacagacaagccaacttgggcttggagaaattcagtaactggcccacagttagtcacagagggagcagacacagactcaggtctgtctgattctcccactgccctgaccctggtgcctggtgactataaaacacacacttgacatgagtctgttctcagagaggccccaggcccaggtgtctgtagttcatttgtgtatcctctcaactctttctagccaccgtggcagcagaattattcatggagctgcaggattcataaacaaggtgctcactgcttggagcttatctttagtcctataaagatgagactaccaccaacacagacaaacatgtctgaaagatgaacatgcttgggaatggatgcatggttaaacagccaattacacagagagagaggacaaacattacattcattggaacagggagtgggaaagacatgggtttcctgtttatactgagcacagttggagaaagctatcattatcctggttcttggggtttagcttgtcaaggcatctgggaggagtggaattttagaacttagagccacataagcatatatattttttacatccggaaaggactttagacctataggtcatctccctcgttccagacgtggggaaactaaggctcagaaaaggaaactagtttgtctctgtcatgcacctaatcagcggctgagctggggattgaacccaggccctctgtcttctaggaggatgctctttccactggaaagtcccaagctttttatagctcaagtcgcctttcattatttacttccaccccaagcagccactgtcccgcatcttcatatttggaaagattttatctgccaaagtacttgtattaatgagtaactaactggtgacccatttttattaatcaaagacagagacacaccaattagactttctgattagcctaagagctaaccagtgttaaaagacaaattgtaaatgaattaaatttaacagagtttaatttaattgggcagccctcagaaccggaagaggttcagagagctccgctgcaccacgtgggcaggcagcatttatgggcagaaaactgaagcsagatacagaaacagcttgataggttacakctccgtatttgcctaatttgaacatggtctgatcgttggctgcctgtgattaactgaagcttggctgctgtgattggctgagactcagctattygttagaaaagtacactacttcaggctttcacctaggtgatgtgctaagttaaaatgcagttccttacataagaactcaaagtatggaggcatcctcaggccaaattgaatttaacaccacattaccatattgataaagaaattcaaagtacgatctcaactcgcatttttcaatgtaaagaataatgtttagccccctgcttcctgtggtattattacctttgaagacctttaagggcttataagagagcccgggttgggaattactgcgtagcatggtgacgcttgctcaagagcactcaggattgccggtgcccctgatgtacaaactgtacttttgatgtaccactcagggacctcactccgcctgtttcccttctcactttcctccttcgctccctccctttttccctcatgattcagatctcccacagggcatagggcaaataatagccatgtttatgtaaagtgtaatgagaatagaatagagtgaaaacagctactattctacatcttgtatgaatcatatatggttttgaacctaaatggagttcaacaacaacccaaagatatttcagatcaatggcagaaaagaatttgatgaaccatcctaaataaaatattggcaaaagaatagaacacataaaaattaatttatctttctaactggataggatttaccacatgccctgaagccagacaccacacaaaagcaaactattaacctagagattctcaagattttcatttcatggctcacttagaaaataatctgctgaagtaaatggtttaactgaagaagctactcatgatcactggaggaacttggccttcagcctgagggatcaatatcttggcactcctataaccatttgcagttgatgtagctcataattggaaagctccaaattactattatctggaagaatactaaaaatctcattagtgtcttaataaatgacaacaagggaattggtaaaatccagcatctgtttctgattaaaatcttggaagagaaagaactcagaagatgtctttttaaaatttgactggaaattttaattgagacccattcacttagtgcctttggtaacgacatcttcagcatgaatgcttctcttctttggtgactggcagctgcgaggttgttttttctactacccagcagcagcagttgctgtgctatgttccaataaaagcctcttgagttgtcctttcagtctggaggagacaatgagagaggcactggccctcatgcctgttcactaggcaactggataggccaggagcaggataggcctggaactgccttgggtgtctgctccattgtccaagcacacattagcacaggccaaccacagcaaagtcacatggggcagaaacgtgcctcgctaagagaccaggcagagcacctagcctcagccgtccttgtgataagctcagaggaccagccactctaccctgcttgaaagctcagctgtgtctgcatctttaagtgaacactcacactaatgggaggcaaagattctgcttcttaatagcactcctcctttcgtttctgcagaagggttcagtcctcactagccaggctcagactcaaagtctcctagctgatggagagtccatttgcactttaggaagatgaggagctgctctgggagctgcctgaatccttgctcccctttgggaaagtgcttgacctctggacattgcagagtgggaggtcggaaagaggcacttgggcttcaacaattcagggctgaaccataaaaggaaattcttattgactgtaattgttttcagctcaaatgagacaaatgagggcttttcatggtagaattacccaagtattagcccttgttaggggtgacatcttagactttccccctgtattaccttagcagagtcggccccacatcaaatgtaattagatgtagaarttcagtttaacatagaaaattgtgattatgcaaatggagactatgctattagaatgtgtttcrggttcggaaaattatatcctwctcttccacattgggttggcttatggttactaattcttgaccctcccagagattccaggctgattaaggtttgcacaaaacagacagacacacttcctccctccaggagctttgattagggccaaatgttggcttccaaactgtgttccttagaggtgcctttgagactgccaggtgggggtcgtgccagggtgccggaccccaaggtttgaccagaatagctcctcttttatttgttgaatacattgggataaaccagttttgtttgaagaaaggactccaagctaaaaatatttcgaaaaccactgccctaaaccacaggtttttgctgtgaatatcaatgcatatgtattagattcccacaaactttctatgttcttttttctttattggaattgtaagtcaaacaacatgaggtatatatgaagaaggttcagcatgtctcatcttactgccttcccattctgcttctctgaagataaccagcattgacaggttgatatatatgctgcacatctttgtctgtatgtgctgatattctttaagcattttttattgcaaaaatttttaaacatacggaacagtagagaccagtataattaatccttgtatacccatcacccaattccaataattatcaaaattttacracacttgcttcatctgtcttttttcatatatttttgttttccaaaaatggcattatagtacacataccacttggtaacctgcttttaacttaacaatctgtcttaaaaagtatttcatatcaccaaggtgagagaatcacttgaggtcaggatttcaagactagcctgggcaatrcagcaagaccctgtttatacaaaaaataaaaattaaaaaatcagctgggtgtgatggctcaagccatcaatagtcccagctattcgggaggctgagtygggaggatggcttgagcccaggagttcaaggctgcagtgagctatgattgtgccactgcattctagtctgagtggtacaggaagactctgacttcttaaaaaaaattattctatatcagcacatttacctccttcttgtcatggctatgtagttttcaattttatgattgagccatcctttactcaaacatttccctattgttggacattcaggctgttcccccaattttttgccacctaataaattactgtaataaatgttcttgcacatgagccatcacatattggggtgctattatttctataggatacatttctaagagtggaatggcrggatcatgggctctgtatactttgttttatttaatattgctaaagtatattctcaaaagtttacagatactcaacctcccactagcaacatatggatatgtgcatttcctcatatcctccacagccctcgttgttactgcttataaaaaacattattatgaaatggtggtgcatgcctgtggtcccagctacttgggaggctgagatgggagaatcacttgagtctggaagtcaaggctgcagtaagccgtgtttgcaccactgcgctctagcctgggtgatgggagtgagacccggtctcaaaaatatatatatatataatgaatccttttgtaaagagatagaataaaattgatattttatgtgtgtctgtgaatggattttttctgcattaattttgtaaattatagttttacaatcattgtttaggggaaagatagccattaagaacgtctggaagagaggggaaaagggaaccgtcttctgaataccactaatgatctttgttcccattagtttgcacagcggaaaggggctggccgtgtggtgcacatctgcaatctccctgaaggaagctgcactgagaatgacgtcattaacctggggctgccctttggaaaggtcactaattacatcctcatgaagtcgactaatcaggtaggtctgggtactttcactccagtgtatatgccacagaccacacattagtgaaagggaacgatataatttttgaaagaagccattcttaacataaagaggcgatgccgtagctggccttctgttggcatggcgtaggtgtttttgctggtgatgtttttttgtttcccctagtttcactctaaccttctagtgataggtacaggcctttgtgaattgcctagaggtgagaggagatgctttggaatgaggtgctcattcacatagaaagggtaattggcacccaaaataaaaatctatggacttgaatctcttcactgtgttgtcaacccccctgagctaattataatcttatcctctaagcctctcctatctgatggcctggatttggagccagccaagaacttgggactaggtatttttcctggtccttgatgtcagcaggtgaggccctttgtctcacagcaggagagtaggagtgtgagaatggatggatgcttactaagtctaaggaactaagaatccttaacctgtaggagttgactgagccctttgggatggagtacctttgtcttcatttctaaagtcaggtggggagtttatactcccaacagtcagaaatcagaatattttatcttttaatgaatatttttactttatgaatcggaggaacaggcataggaaaaattcttttcttaaagaaggctgaactttggagactcatagccacatcaggtcattaagctatctctctccatcaacctggagtgagactactcacttgtctctgttcctacttctcagaaattctattttgggtaaatgcacaraattcagcttgtaacattgatgtggtgagagtccctagattagtattattcccatttgacaagtgagagctagaggtgctaaaatgtttatcaagaaaaargcactgagaaagctgggtggcagaatgtgaaataaaaccctaaagaatcttgacttcttagtcgcccacgctaatgccatagactatgacagcatggagaaaagctgtgcatctgaaattcagaaataaatatgagagaaggaagagaatgagcttgtttagatcatttagtttaaggaaatgagagagtcaggggctcacagtgagggcttccctgtcaccgaccccttttcccctgcagcattgaggaatcaggatcagtatattgtcagtatagtacaaaccaaacaaatccaaaaaacaatagcagcaacaaattcaccacaccaactactggggtaaactgatgcacagtcaaaacggtctctttggaactctcagtagacacaggtttagtggaaaagcccatttgtctgtgttttatcagagcagttaaataaagaagaaagatgctgtggaaacataatcgggaagttttcctttttctttaactcacaacaacatggccttccttcaagcctaggggtttgtgagttcctgaatttttttataaggaaagtagaactcaaataaccaaagcttgtgtctcttgctgtcaccatcaccaccagagagcaagttttatagggatcagctcaaggccacatatgcaactgcccctccagggaaatgtgggttagtgggctcttccatctcagagggattccatggcatgatgtagcccaggacagacatacataattaataacaatgtctggtaaccctggggatcaggaaagggccatcttataatgagctcttttggtgatgtttataaaaaggtctctttgaacagatgggatcaaagagatctcttccttgtgctgactttttttccttttaagtgaggtataaaacacatactctacagtgcataatgtacactcatcctaagtgtacaattccattaatcggttacatgtgtacacccatataattaacacccaggtaaagatatagagcatttccagaatgtcaggtttccttatgcttcttctccatcagttccccatccccacctgagagagaagctcaatgctaactcctgtcaccgttgattagttttgcctgttcttgaacttcatagacgtggaatcatgccttgtgctgaatcttgtttaagaccattaaagtcaagtccagtgagtgtccttcctttctttcttaggcctttttagagatggcttacacagaagctgcacaggccatggtccagtattatcaagaaaaatctgctgtgatcaatggtgagaagttgctcattcggatgtccaagagatacaaggaattgcagctcaaggtaaagcattatcttgctcattcagtcattcaacaagcaccagatgagtttctcctccgtgttaggcactgacctaaaygctggtggaaaggagaggataggaaaagattcagaaattacacactgcctttgaggatctcgaggcaaaccattgcagcatggcaagaaaagtgctcttgaggtaaatacaaagtgcaaagagacgcctgagactacctgggagccaaggaaagttttccagaagaagatgttcacaggggaacttttaaaggaggaagtcagaagggaaaggtgctgagagttccaggcataaacccttgaatacaaccttctctmcctatacagaccttcagtaacattttcttcttctgtcacccccttgatctcttgttctcttctctctccttcatatttacgtcttaagcctcatagaagtccttctaagcagcccttggctgaattggccactgtcagaactcagggatgcattcaaatagttccaaaccagggtttgcttttgttttagctgawctacgtttctttcttttctttccttcttttttgttttattgtgaagtataacagaacacacagaaaaatggctgattatatattgtatggtttaaaaagtaataatgggtgagatctcacaaatcccgtaaaaccaccaccaaagtcaagaaatagaatatggacagcatccagaagctcccgtgagtccctcctcctgttcaacccctccctctctactctcctgacttcaatgataatcatatctgtgcttttccttatagttctatcacctgtatatgcctccctaaacattatggtttagttttgcctgtttttgaactttatataaatggaattatgctgtgttcttacagatcttgcttctttcattcaacatgatgccatccatgttgttgggcatgtctatttattttcattgttatatacatttccattgtatggctatacagtttatccattctactgttgatggacatttgagttgttttagggacaaggctaatctgaaccttctcaaacatgtcatcctggtatatatgcacttgagcatataactagaggtacatacataactaagattgagatagctgcatcataaggcatgcttacctcaactttcctagatgatagcaagctctttccaaaattagttgtctcaaatttatactcctactagtagtgtattagagttttcggccgggcgtggtggctcacccctgtaatcccagcactttgggagaccaaggtgggtggatcacgaggtcaggggttcaagagcagcctggccaacatggtgaaaccccgtctctactaaaaatacaaaaattagccaggcgtggtggcaggcgcctgtaatctcagctactcgggaggctgaggcaggagaatcgctttaacctgggaggcagaggttgcagtgagccaagattgtgccactgcactctagcctgggcaacaaaagtgaaactccgtctcaaaaaaaaaaaaaaagttttcaatggtccacattcttgctaacacattgtcttgtccaacttttaaatttttgcctgtcgtgggagagtatcatggtttatcacagttttgttttgttttgtttttgagacggagtcttgctctgtcaccaggctggagcgcagtggtgcaattttggctcactgcaatctccacctcccaggttcaagcaattctccttccccacctcccgagtagctgggactacaggcacacaccaccatgcctggctactttttttttttttttttttgtattttaatagagacagggtttcgccatattggccaggatggtctcaatatcctgaccttatgatctgcccgcctcagcctcccaaagtgctgggattacaggcgtgaaccaccgtgcctggccagtttatcacagttttatattttattcccctaattgcgcatggagattgagcactttttcatctgtttgttggctgttccatctggatcttctctgatgggctgtttcttttcaggtcatctgcccatgcttttcttttgcattgtgtcttcttattggtttgcaggagttctcttaactggagcacgtagtctatttggatttcttgtaattaatgctgtattagtgtttgaatctaccctcttattttgtgttttctactgttccatttaatagggattttcccgttcactttagctcattccacattgacttagggtccattttgtctaagacccacaggccttaatccaccttcaaggttgaagttagaagacaaaggcttagtggatgtttctggctaggactggcattctgacaagtctccatatgtagatgggcactgtgtcaaccagcttccagagtcctgaatctgctttgcttgcatcattgcctctgaaattccttwactaacagttctccttcaggcagaacctggctttttttttttttttttttcctaataaaagtatattgcttctttcagacaagtaagcatcccaccccattctatatccaagcaaagttcctggtctcctggattcttccctgggggctggaattgaatttctacactaagttcccagtagagctttggtctccaaatgagatgttgtcataagtttctaattaggattaacrgcagtaattggcttcttaaattaaagtaccaaagcatagcaataccttcctgagggagatagtttggggtggtgcaaaaaacatgggttaaagaggtcagatggtcgagttttgctttcagcaaatgtgcactgagtgctcaccgtgggtggaactgggccaggtgccatggagggagaagtagcaagctggcgaggagctcagtctggtgggagaaaaagcaaataaacaaagaaccactgacaaccatgtgacctatcctagattggaagatggtgatgtcagcctgggctctaccgcttcctgctttagtgagcttagaaaagttgcttaacctctgtgaacctcagtttacagatcaggaaaggactatactttgagttatttggctttaagtattttttttcatacattatcttttcagtctcgtaatcactgtaccctgtgaagtgtgtagggkgtataatagcagtaattataagagtacaacaataacaataatgtatacctttaattgagtcccggtactctggggcaaagaagtttacatacattatttaatcctgacatcagtcctgttagacaggtattattatctcagttttacagatgaggaatctgaagctaatagaaattcaggaacttgcccaggattgtacttagctactggaagagctatgattaaaacttagtgctgttttggttttgcactaaagctgcattgttatagtgtgttatcatgatctctgttgtctatgtgaaaaaaacctgagaaatcaggtaatttgcttatagtcacccagccaagaagccgcagagatagtattctaacagagyttcwcaagcttcagtgtgcatacagatcacttggtgatgttgtgaaaactcactttgattcagcatatctagggtagtgctgttattgcgtatttctaacgaggtcccaggagatgctgctgctggtggtcctcggagaacactttgaatagaaagggcgcagaacacattattttctgatctttagcagggcttttctgctccccaagctgccatattccctcttaaggcattgtgaaggtcgcatggaataacagatgtgaaaacaacttaatgtatgtctcaactacatagtaatgcatgctttatggtccctatgttgatatgaatcagctgccactctgtctgcacgtaacagaaattcatctccattaagcctgttggcttaagcaaaaaaaaaaaaaaaaaaaaaaaaaaagaatttatggatgcatgtaaatgaaacgtccaggagtagatctggctgcaggtgcggctggattcaggacccagagaccctcattaggacttggtttctctccacgctgccttctgctcttttggctttgtttactgggggctccctgggatgggccgtagcagcccaggctctctcctctaggtggcatgatggctacagtgacctcagcagctctttctcccccttccstttccttcaacaagagaaagccagagttttttcctagaagctcccacaaaagtcctgagacttttgagagagagtcgctctgactggactagcttagcacaggtgcacattcctgaattgatctctggccagggctaggccatgctgtgattggctggacctgtgtcatctgctacatcctcagagctgggacagagacccacctagagctctggagcaagatgagggaggaacagctgctatcaggaggagggagagtggctaccgggaaggtakagggcaaacactgtatccatgtgtgtctctgggccaaaggggctgcatatgaggtcccaccagggtttgcagaggtggggagaaattctgattgctctttctcctctaactttatcttttgctcaccaggtaaagtatagggagagaagggagagattttaaggtatttttcatttcctstcttgaatatttcttcatgcacatatcttatctccccatatacttcctgtggcaagggagttcctcagcttatttgaggcagaacctttcacatgatagatgtttaataaatatgcaaaatgaataagaaagagaaaatctgaaggaacaacaaaaagtgagtagccttcttcctgcagacctggacaagatgattggaatatattctgggttgttctatrgaaacttcgtcaataagtatggaatcataatctctctgatgcagaagtgaacttggaataatttaaaccagtgtctcccagtcacttcatcagagggtcatcaggggattttttgtggggggagtcctcttgcccagagattctcttcaataggcttcgggtgggaatgagactcccaggtgcttttgagggcagagggtctggtttcagagccattggtcttgccagcctcctcgctacagagagggcttctggccctgggaagcagtcttgtgaatggtccatggtgctctcagttgggaagatgattgagagtcttctctatgtgctgatagttacaaagcaatacaagacatggttctcagttgggaagagttcactctccaactgggagacaaattattcttgtgcaaaattacacaagatttaaacatgagtgcataagtacaggagctaccagaagttccatggcaaaaggcagtgtgactgaggggtgtgaaaaagggaagagattcctaaacaaggccttgaagaaggggagaattagctaaagagagacagagcttccaggcaggagtcgggtgagtgatgatgtcgagcctagaaagcctggtaatgttgaaacagtcagggctgccttgacaggatctggctcagatgagttctgggctcatctagaaggtttcagtgtcttcccaggactcttgaagtgtgtaaaacaggtgtggagttgtcagagggcatgaaactttccagcagctcccttcatgttggccaagcactctgtgacttttacgggtgtagcctgccatgccctgaggcttttggtggatgccagatgggcctcattaacccaccttcactggtggagaaagtgagtttcccatcggcaataagccttgacccagggtgacctagccaggtgcgggcagggctggggctgctcttcctgggttgagattcctagtggtggtgcctccctcttaatatgccagcacttttctaggactgcatggggcttggaatctcacccttgtcttaaaagcagcaagatgtgttaactctgagcactgtagttggtcccttgtggggctgttgagyggaatcattgtcatcacagaatggatgtaaagataacaatgtctgacgtttgcttcaaaataatatagggggtggggaaggagggtggtgagtacagatgtgtattagtccgttctcacactgctttaaagaactgcctgaggccaggccgtggtggctcacgcctgtaatcccagcactttgggaggccgaggtgggcggatcacttgaggtcaggggttcaagagcagcctgaccaacatggtgaaacctaaactaaaaatacaaaaattagccaggtgtggtggcgggcacctgtaatcccagatgcttgggaagctgaggcaggagaatcrcttgaacccagaaggcagaggttgcagtgagccaaggtcgcaccactgcactccagcctgggacacagtgtgagactccgtctcaaaaaaaaaaaaaaagaactacctgaaactgggtaatttataaagaaaagagctttaattggctcatggttccacaggctgcataggaaacatggctgtggaggcctcagaaaacttacagtcgtggcagaaggcaaaggggaagcagacatgtctttcatggccagagcaggagttagagtgggagcagggaggtgctacacacttttaaacagccagatctcgtgagaactctgtcacgagagtagtactgggggatggtgctaaaccattaaaaaccacccacatgatccagtcacctcccaccaggccccaccttcaacatctgggattacaattgaacatgagatttgggtggggacacagaaccaaaccatatcaaaatgcaacaagattagtcatcattgttggctgaagatgggtaatggattcttcggggttcagtaaaccattctctctacttttgtgtatgtttgaaattttctacaatgaaaaggtaaccaaaattttatcatagacctactcttttctctcccatttcaatttttctggggtgattacagctttgtttcacctgccttctttatgcctttacccacagaatacagaagctggccaaagaggaaggtggagagaattttcttagggctttccgaagtcaattctcttatttgaaaatctttggctacttctgtccccttttcagatggcagctggcagctggtccagagagcaccaaacaatttgcaattaccacctaaaatagcagaactgatgctctgatcctcaggagggatcacaatacctgtgaccactagccccagcgtgcagtatttgcagattcatattcattctctgcagccacatccttccatctctccagccatgcatcttgggattagtgttagggagcacctgctccatgccaggctctgtgctggtgctggctgtgtgaagattatcagcccaggggccccctcactggggacctgggatccggatagaagtaactccaggaggtatgggctgaaagtgaccccaggaggaggttctgtggttaagaaaataaggggcagaggaatgtttaagccaaggagaggctcttctaagctcactctaactgcacctctttgacccctgggaaactgcatgggccactagaggatgttttcatctgcagtgtctgatcagcccgctctgcccctcactgggggcacccctgaggggaagggcctgggggtgccatctgtgataaccaacgtgcagaagggaccaagagctcgtggaatgcctctggccctgacattggcctgacctgctcctgcccccatgcacctgagccctaccctcatagtcactctgccatgggtaatctgcaaaacctcagcckctccctgccaagaccatcctcctcccacgtcggtctttcctggatctgggctggaaggaataaccaggaggatatgaagttccagaagagcagaagaaaactggaaccttggggactctttttacaacagaaagctccccatccaactcccatggggaattttatgttctgaagaattgccatatacatttatgccagtctgggggcacattctttagcctttgtctattctagcttggcagtgcaagccacagatttgggagggacccggggtgtggcttcccggcgatggcagatctcatgtcatggtcttggtcctgatggttcccaccagctttcccaagctctgctgctcccctggtgcctgtgtgaaggcagtgctgtgacaggtcctttcagggaccagccatcccagctggctttcccttgatgatacagtagccggagttcattgtgtggcccaaggtgggcaggcaggaagaagacctgcttggtgggatccacatcaagtgcagtcagctccaagtgagcctcttcttctaccccaagtgacaaccgaccctggctgaaggaccastggtctctagccacacggtggggtgggaggagacatcctgggcagcagctttcttcttggccgacaccaacaggcttggcttctatccttgtttggccttggtctgaacaaggtccagtttaagtggctgaggtgctggaggccagtgcaagtcttgggtgatctggtaatttgtaggtggcactttcatgggctttacagagggttgatctctacagctccagtttgacataagggaccatttgccaaagttgtggtgccttttcttgtggacatcctgcccagtgctragttcctgggccttttcttgaatgggggattggctgacttctaaaacctctgacttattcacaagcacagttgaaggagtcactgccttctctttgactttctttcattttgcatctccatatgacaagaggtgaggtccctccctcacttgaacattttatatctcttttctgtgtcctgacctctctccctgaaactgcaggcagctcctccttcattctcacctttactctgtgtttttcccagcccaaccctctatctcaacaataacagataatcagccacgccactcagagcactcataccatgctaggccagctagatcacatctctggacctgagattcccatctgtcaaatgagatacgtgatgctttttaacatttgtatggctcttattgcatgatttagctgggcgtggtggttcatgcctgtaatccctgcactttgagaggccaaggcaggaggattgcttgagcccrggmgttcaagaccagccctggcaacatagcgagaccttgtyttttataaaacctaaaaaaattagcctggtgtggtggtgagcccctgtagtcccaactactttggaggctgaagtgggagaatcacttgtgcctgggaggttgaggctttcagtgagctgtgattgtaccattgcattccagcctgagtgacagagcaagaccccgtttyttaaaaaaaaaaaaaaaaaaaaaaaaaaaaaaattgcatgattctttgtaaattacatagaaaaaatcaaggaaaaaaagtcgattaaatttaataaaactcattatcaaaagtttacatagactgagggtttttagtcttggtctttaaaaaaatcagctttattttttgagatataactcacattccataaaattcactctgcttgctacatttttatgtaagggatgaattctgcatagtcttcaggaagatgctcctgttgccttttgtgcttatgaatttctttttaaaaatcatttattatttatttattttggttatcatgtgtccattctgggtttaggaaagggctttggtcgggaatggggggctggggttggtcctgtcctggcatagccaccgtctaatgacctctgggaaggatggagccctggctgcctactattctcagctgtgaagcccgactcccagcttatgccaccctcctcacagatttactttgagcatcagctgatgtctgtgcttgaggtgttgaagggggcacagagcatggaaagcatggaaaggaacttggagttaaaatacctggtgtcaggtcctgattcttttcactatctgtgtgaccttgaagtgttccttaacccaatacaactccaagagtcaccaactgcatggaacacagggtggctggtgaccctggagctgtgcagagcagagaccctgcctcaacctctctggctctaagtttccatagatataaaaagcggaggctgcagtcaatgatcttcaagtctttccaagtttacaatgcatgcctgcctgccttccttccctccctccatccctctgtccttttctttctttcacattttaatttttttttattcgggcagaggtgggtattaacaaatgctgcttgtctccagcacatggatgtgaacaccaggctccttccttccccagctcaatggaccactcagtgttctctgggccacacagccccacccagttcagcattatactcacactcatccgttggattacaccttttgtcttccccacacaaggtattttttcccttttggtggaccaggcaatgaatgacccaggtcagagctgcttccctcaggtgtttgcaaggccatctctgatctgatggtgatctctctsactttgctagaaacccgggaaggccgtggctgccatcatccaggacatccattcccagagggagagggacatgttccgggaagcagacaggtgaggccccaagccccaagtcyccaggcaggttctgggcagtgggaacagactcctgtttctcattcttaggggcatttgagtcatgctgtgccctgttcttgcccctaccccatccatctgcttttctgggtcccacttttccatgttccccatgaaaaacaccagtccagttcagacatgctgctccggttaacctcaggaaaatacaaaatgctgagcttcccttcagctcctcaccctttgttggaaaataatataggaaaaggtctgttaatatttggccctttggggcaagtctacaccctattaaaacagcctaaaagtaatgygtgtgtgtgtgtgtgtgtgygcrtgtgtgcgtgtgtgtgtgcatgtgtgtgcgtgtgtgtgtgtgtgtacgtgtggcttcgtttagaaccagctcttggttttcataagttgaatgtagatgtaggaagtaaaatgtagatggttaaaaaaaatcagttatttgaacagtcactttctcgaaacattgaatatattcagttttccaacccatttcttccaaccgaagtttgtgatcaggccaagctggggctataagttgaccactgtcactcccctacaaagacagttcctgaagagaaccaaggtagaaaactgcaggagcaggcacctggctggcacgtcctggggttcttgctggggtggccacagtcggtgctgtcacttccctgtagagggcacaagcccagggtgtttcccccatgatggtcaaggcagcctggtcctagcaagatgcaccttggtgtcccctggtcagtgagggctacgtggttttcctgtgtttgggaacttaatgaaaaaatgcccatccttttagaatatcggatatatgactcagttgacctgcttaataaccaaacagccttcagagtgtatctgtatatatgtgcgtatatctttgtacgtaactgttcaggctgggaatctttatttgtttattagtctgtctgtttttttaaaaaaattctgattatttgggttttttaaagacgtgtaaagccacatcttgccacctgcaattctgcggcagagtggaggggggttaggaagtcttgttctgaaccttacacaggttggggtccttgtctgggtttcagtttcttcatctcagacgtgtagatcaggattctagagtatcttccaaccctaaaatgccttcctaattcttttttttaacctctgagcgtgccctccccaatagttagcatcccttttccatgcataaattgagctgagaaataaatgagaaaactggaggctaagaggttggcttcattctgatacagcccaaatgtaggagtggcttcaagtcttgtagctaagaggccggctaatggcacccagggttaggcagccttacccactaggctggactagggcaatcttgccccccagcgcccaccccgcacacccccaggaggacagtcagaggtccgctccctgagcatagctcccttccaagagaaggcaagctggaaccgagccaaatcagcccagttcttcttcctagttcccaggagcagaatgagtaaaggcacagcgagtggccagtgctgtgcttaggagaagtcctctgcacggaagccagaagggaggaaaaggctttctcctgaaccactctgtgtggttctgtagagttgggagttaagagtgtacacagttacatgcacagtatatctaagacagagactgtgtgtctgtgtgtgggtggkgtgggatgggaggtgtgaagattctaaatcctgctccttggctccctcacagatatggcccagaaaggccgcggtctcgtagtccggtgagccggtcactctccccgaggtcccacactcccagcttcacctcctgcagctcttcccacagccctccgggcccctcccgggctgactggggcaatggccgggactcctgggagcactctccctatgccaggagggaggaagagcgagacccggctccctggagggacaacggagatgacaagagggacaggatggacccctgggcacatgatcgcaaacaccacccccggcaactggacaaggctgagttggacgagcgaccagaaggagggaggccccaccgggagaagtacccgagatctgggtctcccaacctgccccactctgtgtccagctacaaaagccgtgaagacggctactaccggaaagagcccaaagccaagtsggacaagtatctgaagcagcagcaggatgcccccgggaggtccaggaggaaagacgaggccaggctgcgggaaagcagacacccccatccggatgactcaggcaaggaagatgggctggggccaaaggtcactagggcccctgagggcgccaaggccaagcagaatgagaaaaataaaaccaagagaactgatagagaccaagaaggagctgatgatagaaaagaaaacacaatggcagagaatgaggtaatgatcaatttcttccccaggtaaggcgaggcaggccctgaaggagaataatcataataatataatgaggatgaacgtttattgaatgaatgaacatttactggctatttactatgcgctaggcactgtgcaagacactttatctcaatgaactcatttaatccycacaggttttgagtaccaacctttgagcttggtactattgttactgcaggtgaggaractgaggcacagagaacttacgttatttgtccaagaacacacggtcaggaaatggcagacccagaattataccaaggagatctggccccaaatcccatggcacctgttgcctttactagaagttagggtgggacatcatggaaaggcctgtagtcctgttcgtccagtagggagtggcctgaggtgtttgcacccaaagagcctcccaagggagattagatctttggttcattctgtcctccctcctgccaraagcatttaccagtcctggaactctgaggagaagtggtgaaggagaagccgtcaccacctgctaaattaaactgggtgcccagagctgtccacagtgttttacctccactctaataaaaatgcacggtggctgggcacagtggctcatgcctgtaatcctagcactttgggaggccgaggcaggcagatcacctgaggtcaggagttcgagaccagcctggccaatatggtgaaaccctgtctctactaaaaatacaaaaattagccaggcaaggtggtgcacccctgtagtcccagctactcaggaggctgaggcaggagaatcactttaacccggaaggcggaggttgcagtgagccgagatcatgtctttgcactccagcctggatgacaagagcgaaactctatttcaaaaaaaaaaaaaaaaaaaaaatgcatggcaatggctggcaccttcatggcatctgaaaggtctgagggcttgcagcagtacttcagttcacacaggggcgtcacaaggagggttgtggttaccaggtttatattctaacttggcttacacttccttcttgccagagccttctatatttaagtaggggtaggataagtgaggtttggcaatatgcataaggagcctaatttttaaaatcctccacacataccttctagtcattctgacctgggagttggtgacaatactaagtgcaaataaggaaaccaaatctctactccatgaacactgaagagtcaccttttggatgctacttcagcattcattccaacatgtatagatggagtgccactttgccaggtgatgtgctaggtgcaggcgagccaaaggtgaataggacatagtccatgttacagcagagactgaagtccagtggtggaaacagacctattaatataaaaataatttgtatacaatgggactcatgccagcatttacagcggatgagctgctctgtgggcaattattaactctgcacaggaacgggaaaatagctgctcagagagggtgatatttgagctgagtattaaaagtagaaaaaagcagtttgggttttgttttgtttttttttttgagacagagtctcactctgttgcccacccaggctggagtgcagtggtgtgatctcagctcacggcaacctctgcctcctaggttcaagcaattctcctgcctcagcctccttagtatttgggattacaggagtgcgccaccacgcccggctaatttttatatttttagtagagacagggtttcaccatgttggtcaggctggtctcgaactgctgacctcgtgatcctcctgccttggcctcccaaagtgctgggattacaggcgtgagccgccgtgccctgccaagattcttgatagaagcagaagccagggcaaaagtgaaaaagaaagactgttttgaagaacctggagataatcggcatggctgcatctttagggcatattagggataatgtttttaaagagtaaaatcatgactctgatgcacatatataatgaatacatgtcaaaggttttattcaactcattaattaatgacggcatcatgagatgcaaaaaccaactcaaaagagaatccaaagagcaggcaacatatacaggcaatcaggaatgctaaaatgaatttgctaataggtgtaaaagtggccccttccacagggggcagggaatcggttgcatctccagcagagacaattcatgtgcatctctaggaacaagaatcatttgtattaggatctgatttctgcaacttatacagttgtaaaatacctcagttcaagataatgaaaggtgcagacttctatagaatcagatgccctgaaaggatgtgctagacaaatgcccagcgttccagtgaaaggacacccagtagtctttttttgcccattacaaagtctgccacgatttttcctaactggcatagcaggaggaagaacagsagatgagattagggaagagggtgagactcatggaagacactgtgtgcctcaccaaggacttgaactggatcccaaggacctggtgaaccagtggatattttaaaaagtgtatgtgcttggaggtgtccaagttgctggtgatggatgatgggcagagagcaagagttggcaggggctcaaggaaagcctgggcttcatgtggataccaccagcctgccaaccctctctcccccaaggctgagaggtggagctgcttcctgcacttctactcacactcctgagactctgccctgggaacctcatttcttctactgttttaccaccctgctctcatcggtttgtataacattgctcatttaaggtgacactatgtgtcagccaaagagcccctgatggaaaaagaatctcagaaagccccaagaatttccccacagttctgtccctcaagttggttctgcctcttacaaccctggagtggggtcagtagggacttactggggcccctcacagattgtgtctttaggtttggagccaggcagtccaacagtgtgtgttggaatgactgcagaacagagagtattttgcactgtcctcaaactctgtatgatgaactcaagaaaagcccagaccccacagggctgcccctggagtcagataacaggtggcaactgaacttgggaatgaaggcagcagggcttgctgttcttccagtgcaccaggcacctcctgccctcagcgcctttacaggtgttgctgctgccgaggagccacaagtcttcctggcttgctcctcacctccttcgtctttactcatggccacattctctactgtccctggccactgcacatgatttcaacaccccaacctgctcttctccctcccaccactgcaaaccatctcaacaccccacccaaccccctcacctcccccgacactactgcagaccatctcaacaccccaacccattcctctccctccccaccactgcataccatctcaacaccccaacccactcttctccctccccgccactgcagaccatctcaacaccccaacctgctcccctccctctcgtcactgcagaccatctcaataccccaacccattcctctccctcgcaccgctgcagaccacctcaacacctcaaccccctcctctccctccctgctttcctgtttttggtggcatttaccaccttcaaacctatcacttaatgtctttattttacttagtgtctattgtcacccccagctccaggtgtaaacttcacaaggcaggaagttttgtctgttgtgttcactgctgtgttcccagtccctagaggagggcttggcacagagcaggtgtccagtgagtacctgttgaaggtatgaaggttggaacccagactctggaagcaaaggcctggcttstgagaaccaggtcagaccctgctttcttctgcctcacttttcttgtttgtaaaatggatgtgatcacaaggctgttgtagtactgtaaagaggtcatgctcattaaaatatcctgagctctctggagaaagtttccgtggttgagaagccagtgtgcgtgctgctccgtggtgatgggtggccacgtccatacctgagacccaatcctggccacaggaccataaagaggaggaaagaaatgaagtcacagataaggaaaacatggggaagaaacactgctacatcctactgggagggagggttcgagagtggcaggcccaggtgactagggaagggaagccaggctaatgacaagtggagccaggccagcatgatgggaccatggctgactgagaaagtggtgccatctgtggggccggagctactgctcagctccattctacagctgccatgcaggaacgcatgccacgctgtcaaatctcccttttcttagagcaagacaagtgtctagtataaaccaaaacatacctgtgggccagatgccatctagaagccccagagtgtaacccctggtataaccaatccataagaggtgaagatttttaaaacccttatgyttcagagcctagacaagacccaaccatgcgggaagacaggtgagaacttgttattcgccccacccscttctaccaatttcattcttttattgaccaatatttgtggagcacccggcattgggactatagttagtgacactgaaatgacccctgggctcgtggagctcatagtctagtgagagaaatgctaatccagtgatttcttaaatgaacagaagagcttgagtattaagtgctaagaaggagatgaaggtacgcaatgctgtgagtgcctgtgataaatctgagccttctcagggttaggctgtgcctattgagatttggaggcacggtgagtattgactgggtgaaaaggaagtgaaaagacagaggaagcagcatgcacaagggcctccagcagctccagggctccagcgttgccgtagcagagagctggcattagagtaacaggaggtgaggctgacttgtcaacagggcctacactatgcagggccttgtaggcaggttgaagatttttgcctttatcttaactaccaggggaagcraatgaagtatttaagcaagaaaatacagtgaggaggctggacacagtggctcacgcctgtaattccagcactttgggaggctgaggcaggcagatcgcttgaggtcaggagttcgagaccagcctggccaacatggtgaaaccctgtctctactaaaaatacaaaaaaaaaaaaaaattagccaggtgtggtggcaggcacctgtaatcccagttacttgggaggctgaggcagcagaattgcttgaacccaggaggcggagattgcggtgagccgagatcatgccattgcactccagcctgggcaacaagagcaaaactccatctcaaaaaaaaaaaaaaaammaaaacgacaatatggtgaggatgtgatcatttttgcattttggaatgatcattcttgattgccttgggaagaatagattttgggggaaggtacagagcagaagtgggagaccagtttcgaagtggttcggtagcccgggccctgtggtggcagagccctgcttgcaacagttggcgttttcagtctcagtctgtgagctgctgtgggcagctgggggcacccgttgcacccatctgttccacttaagctgctgctctctcctggaagtgatcccacagcaaagggaagctctgaaaggttgtttcctttgcctgcagggtggaagagcaggggtctgcttggtggagggctttcagcccggctagcaagactgtccctgcctctcccaactcgaactgaagggggtccctttactgtgttgatctgggagtgtggctgcaggaactgcttgggaagggtaaggattattcattttgacaagagagggccatggataggtgattcagggagataaaaataaagtcacctgttggtagaagctataatagctaaaaaggtatttgtagttgctttatactcaggctagtgcagtagacttcagcaaagctttcagtggaatcttccacagcaaacactggaaacaaaggactttaggatttgaaccatgtatccctgtccagtaataactggtgaaaccagtcagccctgagcttctgctccagctggctcctagtcagctcaagggggtgtgtctgattgtaagaaatcagaactagagtggtttacttagaaccaacctcagccaagaatgtcctagaactgcagcttggccctcagaaagcccaggagtagtcattgatttggtggccaaagtttaagtcatgggagaatatcccccagaaacttctaatgtgggggttggcaaagttttctaggactagatagtaaatattttagcctatgtgggccaaggggcaaaattgaggattttatgtaggcacttctataatcacttaaaatgtaattatgtaaacgtgtaaaattcattcttagctcacaagctatacaaaaacaggctgtaggtcagattcggcctgcagactatagtttgttgacccttgtcttaaaggttgggtagaggccctaattctcaaaccaaacacctgctttcaattgttcagtttcacagacatgcgcactactgtgagggtcctgatttgggggaagggaatrcaaggaaggaggaaagggagtgttagtttgggctatcactcaaggacagagggcaacagaaaggtgtgagggcactctgactgtgccctttctacctataagtgtcctgaatgatttttttcatagccaagatgactctgttggggaaatgtcaccgtgatggttaaccctggggtcttggccggcccaagtcagttcaagttttgttgcttctactctgcaaaaaatacccagtttgccaggtatttctgccccctaaagacatcgggccaggcttcaagacatttctctgcctccatttgtctgtgtgactgtgagcaaattacttaacctctctgaacctcagttttctaatctataaaatgaagatgctgatagcagctgcctccaagggattctgggaggataaaggaaatgctgtatgtgaaacctatctgagagctgggacctgcattcaatatcattctttttttcttctccctgtcactgctcactgttgatttggtttgctctgttcttcctttgataaggctggaaaagaggaacaggagggcatggaagaaagccctcaatcagtgggcagacaggagaaagaagcagagttctctgatccggaaaacacaaggacaaagaaggtaaagtttgtttcagattctgcacttctgccatgagggactgagtcacaggagtcccccttttgcctggtgatgtcctgctggatggaatatggctgagaccccaccattagttccatgaatgaaccagtcctcctagcgctactttggaggagtggctgtgcctggaatcttcggacagtttttattgaagcgatctttacccacatgtctgggctctgctcactctccagcaatttggctgtgttcctacgagaaaacatgtgcccaaaaaaagactcaggcttcagagccaggctcccaaaatagacaagtcccttggcggggatggggcgagaagctgctttgggcactcaagctggggccctgacttcagcaggcccagaccctaggattaacaagccatctactgtgcttgtayagattgttttacttaattaaaatgaaaaaatccagttacagttctcctgggctggagctgccacaacaaaaagaaatatccttggaacagggccatcttcgtgcctttccggtcaggagaggcaggagaaatgagtatcgctggcagggaagctgatctcctaaatctgtctgtggagttgggagtccatgggctgctgcagatgccaaggggaaagttctagaaggggcctagtagaagctttggctgtgggagtgtatgtacccctgctgggagagggtgcttggggggaattttgtgaggggctttgctgcagttacatttagtgatgacccagatgcaagaaagatgctccagtaagtatttagagtttataacttcattattcatgcattcaaaaactgtatattgagcacccattatctactggggcttgaaattctttgcgtcactttaaatatggtggattaagcattaagggcctattccaaactttgagcatcaccctaaagatgagttggtgcygtgggacttgagtggttcacagtaattgtaccaggtagaggtaagaatgctcagattcttcctgatttgagtggtccttatggccaagtcttgtgccttccagttgaatgctctcaaccaccctctgacctccattctgcatttttgtacaggaacaagattgggagagtgaaagtgaggcagagggggagagctggtatcccactaacatggaggagctggtgacagtggacgaggttggggaagaagaagattttatcgtggaaccagacatcccagagctggaagaaattgtgcccattgaccagaaagacaaaatttgcccagaaacatgtctgtgtgtgacaaccaccttagacttagacctggcccaggatttccccaaggaaggagtcaaggccgtagggaatggggctgcagaaatcagcctcaagtcacccagagaactgccctctgcttccacaagctgtcccagtgacatggacgtggaaatgcctggcctaaatctggatgctgagcggaagccagctgaaagtgagacaggcctctccctggaggattcagattgctacgagaaggaggcaaagggagtggagagctcagatgttcatccagcccctacagtccagcaaatgtcttcccctaagccagcagaggagagggcccggcagccaagcccatttgtggatgattgcaagaccagggggacccccgaagatggggcttgtgaaggcagccccctggaggagaaagccagcccccccatcgaaactgacctccaaaaccaagcttgccaagaagtgttgaccccgggtaactatctcccctttcctcacgggtggtcgggttgattggactcctgctcacctgataaagtatgagcatgtgcaggctggaatgaacataagtaaggtttcaactagcattaaagtgggtgcagaaagtgatttagcaacaaaggcaagcctctaaaagcctggctaaactgttagtgattttaggcaagtggtgtaaaggaagttagataggaggctgcatgttttctgagaagcaaactcagggcagacttctctgcatttacaggagcccagatggacttggataactaaaattagactgggttatcagcaaaaggagatcaggaggagcctcgtgcctgcacagcagagggccacccaggctgttatttctgtgatgggggcaagagtaggggatacaagaaaggagtggaaggggaaggaacagaggatccttaaagggtacagctgttccccttcttactacctcagacccattttttgctagggtctgacagtgatacaagacttgtttcaggatattctctcactccattggaggtgacgttttgtgcctatgcccggcactgtgacatcatgaaagagagagtttaaaataggctaagccccgtcttctctgccaagtggaacttaagatccatcagggggtttggggggagggagagagagtagcctttaagattctcactgtgaaaataattagggatttgctttacagaaagcctgtagcacaccagaggttgaagtgagagtcaggggcagaaaatacagaggaaaggcttaaaaatgaacatttcaacccagggccctgtgggtggcatgagctgttaggtaactgggaggcttgggattttttccatgtcaagctgacctgagctgttttttacctgcacggatctgagtttccatggaaaccccgccgtgaaatgccttcttgttgctagagaaaccgtgaggcccaggctctgtctagagaaggcaagaataaaggaggagtgaaatcttcacctcactccaatcaagccccttttattttgcggtataggtctcaacatgtgccagtgttagaggctcattaactgacccagtgtttggggttcatatttaataacagcttgacaagcttggggagagaatggcattgcctgttttgctagcctcggtggacgtcagcacaatttttgcccgtcagtaattcctctgcctgcagagatggaatgatactgagatgggaggcatggggggtggggggtggatcttctcaactgaaggcatcagcagcccatccccctgggccaaatgcaaacatttgccaagttttattgtgtgtggcattcttttggcagtggaaaaagctcctaatgacagtgctttggttctaattagcaaccattgccccagccttatgtgattaagcagtccaaggaacaattcccaatcatactatgcaggcatagaatttcagggactctttgaggcatgttgtatttcttttttttttttttgccttggttcatgttttgcagaaaactccaggtacgtggaaatgaaatctctggaggtgaggtcaccagagtacactgaagtggaactgaaacagcccctttctttgccctcttgggaaccagaggatgtgttcagtgaacttagcattcctctaggtaagcaaaacacacagtctttcctgaaattcaggtctaggaaataacagttccatagcaacctcaagagcttgagagagctttttggcattttgttgttgacatcgttttttgttcttttgagacaaggtctcactctgtcacccaggctgcagtgcagtggcatgatctcagctcactgcagcctcaaattcctgggctcaagtgatcctcccacctcagcctcctgagaarcttggacaacaggtacacaccaccaggcccggctaatttttttaattttttttttttttgcagagatggggtctccatatgtggcccaggctggtcttcacctcctgggcttaagtgatcctcctgcctcagcttcccaaagtgctgggaytacaggtgtgagccacttcacctggccggcctatcgttattttaagtgtatgatgcaataacctagatttgcaaggggcggctgtaaactttcttgcaatttcagtctcccgtaatagaccagatactccgtgaaaacagccttgaataacagtgccctgggacccagaactaagaagtcctgtttttcctgtcagggaatgctttattcttgatgacatggagtctttaagcctagcctttattcaggcaggaaagcagatgcccagcagcctccataaagtcaacaaaaatgaacttcgtctgctattgttcattgctccagtccttcccagaacaatgctacatatttttttctctttaaaggaccaacttttctgaggcaatgatgctgaatagaatgtgtttggggcagactacccctagttcatagaaagggtattgaacagggagacctgggtttctgttcttcctacttatgggtgactgtgtgccctcaggtaagtcataccccttcttgagccttagtttcctcwctgtaatttagacagygattttttcaatggtggaagtgttgggaatgaagtggggagggagtttactgatggaatcacctaggaatgaatcccttttcaaagagaagagttaagcagagtctcagggtagggagtgaaggcactttaagaaagttcccygggagattctgacacaaccactaacccagcaactccagcctacatcatctttgagtcccctcgcattagctctgaaaggtcggaattagataaagtagtagtagcagctgctcagaaggagagctcaggaaagtgtcacctgggaaagtgtcacaaggaagcataaaaagcacgggtcatctgatgcctgatgaccacgtgtctgatcatgcagggaggggctggtcagtgtggaggctcgtcctttccatccaacttgctctttttttcccttctcctttaaaaaaatctcttactatttctttcctccaggtgtaccatttttatagtcagatctggagagcaaacttccttttttttttaagggataaatttgctgcacagcatctcccaagacaaaaacataagaaagaaggaaaaagaaatactaacyttagaataaactgagatgaccctgggtattttagctctagaaaacagttgcaaaggccaccctgcaggagaagagagggctccttcatgcattcagtcagtcagcaaatacttactggataacatggtactgtgctagacactctggggtaaccaagaaatataacgcaagtctcttgtcatccaagaacttggaacctaattgatactagcaaaaattaagaataaattctgctaccttgtaatttgtgttttactactgtttttcattatagaaagtgtgaaagattattgtaacaaattcaaaaaataagaaccatatcaagtcaatattaaaggtctgattgatctcttccctccagtctctccccagtctccagaggtagcctaccactgtcatgcccagtttttctctcacaaaaatgggatcacactacacacataatgttctgcaagttcacttagtagcaggtcttagacatttcttcatgtcagtacatagagaacacattctttttaaccactgcaaatattccatcgtaaaagctatgctataaatgactgatctttcctctgctggtgaacagttaggctgtctgctctttttcccattttaatagctaagcttttattgttaacattccccatgcaggcaccatccctagggatctgtatgtattatcacatttaaccmtctcaaaacacctatgaggtaggtgctgtttttatccttatttaacagataaaaaatctgaaatgcagagtcacacagctaataactggcaaaaaccagagtcaggttcaaatcccagtcatctgactctagagccatgttcttagcttctgttctctgctgcctttcagatgtgcttgttcagtggtatgtgtatgccagtgttcctgtgggagagcrtcctagccagggggttgtagggtggtatgtatttgcattttaaattttcataattgctactaaattgcactccaaaaagatggtatcagttttccctgcgaccttgagtgagagttcccaatatccacctcccattggattttatcagtttttaatctttcctaaccagttaggaagaaaatagtatctcacctttttaaaattggctctattgagttataatggatataaagtaagtgcatatcaagtgcatagtttgatcagttttgacctataaatatacctgtgagaccatcaccrcaatcaagactgggaacaatgttcatcatatcccaaatttcctgtctcctatgtaacccctccctccccacagtgcaacccccaggtaaaggatctcctttctgtcactaaatattagtttgcattttctagagttttatataaagggaatcatattgtatgtgctagtttggcttcttttgctcaacatcattgagattcatctgtactgttgggtggatcagtagtctgtttcattcttcttcttttttttttttttttgagacaaagtttttctctcgttacccaggcgggagtacagtggcatgatcttggctcactgcaacctccacctcctgggttcaagtgattctcctgcctcagcctccggagtagctgggattacaggcacctgccaccacgcctggctagtttttkgtctttttttagtagagataaggttccaccatgttggccttgaactgttggggtcttgaactcctgacctcaggtgatccacctgcctcagcctcccaaagtgctaggattacaggtgtgagccaccgtgcccggccagtctgtttctttttattgttgaggagtattgcgttgcatatatggatacatcacattctgtttatttattcatctgttgacaaatatttgggttgttttcagttcggggcctttacagattgtatttgttaatagtcttcagttagctttgagattcattatctcattggtccccgaaggaagagtatggtatgaggttctgcatttgacaggtgaggaaactgaagtccagagacttacccaggatgacatagcaaaygcaggttagaactcaggatttctcagcctgggcaacatagggagaccctgtctctgcaaaaaaataaaataaaataaaactagccaggagttgtggtgtaaatctgcagtcccagctacttgggaggctgagggaggaggattgcttgaacctgggaggagatccaggctgcagtgagccattrttgtgccactgcactccagcctgggcagcagagtgagtgagaccctgtctcagaaaaaaaggaaaagaaacaaaaaaaaaaactcaggatttccgatctcagatcactctgttctccaggttcttccagttcaggcagcaacacagtgtaggaaaggctacatttgtgcagaaactatgaacacagtctgtggaatctgattccctgagtttaaatcccctgtctactacctactggctggatgacaaagagcaacttatttaacctctgcttggatttcttcatctgtgaatcagccatagtaataggaggctactacgcagagttattttgaggattaagtgaacaaatactggtaaggtcttagtggcttccagtgggaggtacttaataagggttgtctattattattattcactcatgaaatatttaagacctattatggctcctctcaccggggctgcataaccctttagcctgcaggactggtcactactggcatggagacttctagggaggtgagagacaattttttggctttgtcccatggaaagcatagagctgaaataagggatgtcaaggactgggctcccagatgggaggaaagggaggccagtcgcgttgctcggggactgggggtgggcatggctggggaagtacactgcactctgcacttgagatccaggccagttctgcatgaccctggccagcgcgagcctgccaaggcttgctctcagtagaaacaaacagcatcgcctgcaaagtgcaagctccctcctctatccatcccagctttactaggatgacagagttataattacccgtgccatgagctgttattagaagccaaatgcagctttagtgatcctagtagaggctgaaaaatggaggactgagtggctccagaacacatcagggccggggcaatatgtcttgatgctgcctcttcatgtccccgtcacattccagaagtgtcctgagttgtgccatgggatatgtggtgtctgcagcaacccccatttattctgggacaagttaccagctcttggggtttctcctcccccaggcttctcttcccctagtgctgcctggtagctgcctggtactgcctgaacttgcagagcaggggccagggaagaaagttgccaccaaactgtggagccgggttccccaggtggccttggggagaggttggggttcaagtgagaaagccaacatttaggcagttattaacagcttctgtgatgaaatatttaacacgtgtctccaaaccagtatttttgagcaacaggcaaaatgataggtgattcycctaaacatcacttacagcactattattcctatttcacagatgaggaaactaatctcagagagggtaaacagtgtgcctgaggtcacacagcataagtaaaagagttgggtttgcctctacattctattttctctccatgacactgtggcttccaaggtttttttttgtttgtttgctttttgttttttgtttgtttgtttgtttttttgacagtagaagtctttgttcaagtgaaatcggttccagaactgacagaagatagctctagctacactgctgggggctttggctaccagctcaatccctgcttcagggtctgtggtagctcctagggcatctgtaccccttctggggatcccaggacagggactcagaggactcaacagggggcttaataaaaaccccagggcttctttcctggtaccacccagctggttcatcctccagaggctgggacgggactgagagtgtggctctgatcaaagctctccttttttcccagctgcccctctcctatactgcgggggtctcggctccctgcagagcagcagcagagggaaaactattttgtaacaacgcaggaaggaggcagaccttgctgaatgcgcctctgccagcaccaacagccaggagccaggacctgtttgtgaggtggaggggagaactggcccccacagcccaagctggggccacttttccatcctttgcagagaggaagggaaggacactcaacctccctccgggcacctgggcctgagtgaggccctctcacttctggggaccactgctgagggcatggcgtgtagcctgcaatgtggcagttagagaaagccagactgaggaggacgcctcaggccccggaccacagccccactgtcagtccaggcaggcctcctgggctccctccttccctcccatctccctccctcagagctgcccttcacactgataagtggctattttgaaatgaaaaaaaagttctaatgacaagtctasgctgcttccttctgacagggtctcctaggcacttagctcagtgtcctgggaggtgggaggaggaaagtgaagccacccaaccagctgggcttgcagtcggtcacgctgtgccttggagcaggcgctgtcatgagtggagaccttgcctgtccccatccctgcaagaaattgctgttcccctgcctgtgccattcccaggccccttccttccttctacccaggatggccagacctgaaaccattgcccagccccagcagaagagaggcttgccccgcagcctgcaagtgggattgggtgttccaagcatcacccctctttcttagttccctgatgggtcctgcttctcacagccctcacaccctgccctttggctggcgctgcacagtcaggtgcctggtaaacagggcatgtgttcctacctccattctcaggtgaggaaactgagccccaggagcagttcggctgactctccccrggtcacatgggttcttagcatctggcctggaccctctcagagctgggctctttccactccactgactgaccgtgtcttcaaaaggagaactgtgacctgcaaaacaccttcgtggaggctggagcagccaccatcccttcaaggatgactcccctggctgtgacattgtcactcctctctggcggtggtgccagttgtttcctttgcttggaatcaaaaggcctcccagaattctgggacttatatttaataaatcacaaatgaaatgctaattgatggttcggatgtaaagactagaggaagtgggaaaatgttaatgatatacaatttcacgaaaaaaagaggacagagaattgtaattagggtatgactaaaatggcccccccaaaagaggcctacatataggttaattatgtggaagaaaatatttggattggagtgactctgggtgatttttyccttccttttatttacttttttttctgtaaagaacataattctaaaataaacaaacaaaaaygagagaattcttcgagagtcccggtcacagcagctgcagagagaggtacagtgtgaagaaatgaaatccaacaagtgaaatatcagaaatgtcaraaatcaccttcattgttcttggaaggaggctgatagtaggagaacaggccagcggcaggccatggaatggctaagtgcttaccacaccrccgagtccatcccttacattcacaacaacctgtgaatgaagtgggtgtgagtctctttgtgactgttctgcaagtgaggaaactgaggcttggagaagctcagtaaccagccaaggtcaacagcaagtgaggggtggagctcgtggctcccatttctacctgatggctgccaggacacaggggcctgcctcccatsccatcctaaccctgcgtgtctatcccccatcstttcccaggggtggagttcgtggttcccaggactggcttttattgcaagctgtgtgggctgttctacacgagcgaggagacagcaaagatgagccactgccgcagcgctgtccactacaggaacttacaggtaaaaatccactctccttgcccagcatgccaggggctccccagtctccataaccgagccaggtgtctggcgtccttggccttgcttgcctctgagtctagctcctacctgcaaggcctactccaggccacaggttacttgccattccccaagcacaccaggctgttttctgcttctgtgtctgtctccttccgctacatggaaaacccctaatcttcccatagacttgattccatcaggctgctctcgacatggtggctacctcctgtgttgctcctagcacatgtctctactttaatacctaaaacatcctgtttgggttggctttggcaatatccacctctccctctatactgtgagtaactcaagttaggccagtgttcctctggcctgtgattgggactgaccccttcccacaagactcggatgttctagtttttctctgtttctgttcccctatgcaggtatccctgcttgctagaataaaaaaaaaaaaaaaaaaaaaaaaacactgctttgttctttttaactgttcatccatacagcaaatacttatcacaggcatgctaggtaccagacactattctagggaccagggatactgtaacaacaacagtaaagtggacaaaaatccctgttctcatggatttttcattctaatgtaggtgacaagcaataaatgaaataaatggtatagtatgttaaagggcgacatataaaaaatactctatacaccgtatttcacccagtctaaggtgccatcatttgtaaggcaccactattttttggtaccaactagaaaaaaaatgttgcaaatcaagtgatgagactccatcaactgtaaaatgaatttttatttcagagatattaatgtgtgaaaaaatgtgtcttgagatcaatgaaatatggtaatatgttctataatatatacctaattaatatgtaatatattagaatgtggttttcatgattaacttctggcatgggctaggttttgatagcttaacagaagacatggtatatcagagggccaggggtaagtatctgaagacacctcctgtttttactacaaggaatcagactagttatttgaaccataaggctttgactcaagaagtcctcacagtggctgtgcccaagtcccaggctaggcattactattatcattaaattgtttaaaagtgactgatctagccgttcttaaccagggacatgaatcagactcatctggacagtatttctaaaattcaggtactaagttatatatttagtagaatttggaggtggaaggcagattgcaggaatatgtaatttgagaaagttctccaaaagattcaaatgtgcacccctagttaaaaaaaaaacaaactcagatatgggccaattttcttgtttaataattgagaaaattgagacccagagaagctatataattcatccaagtccacacagatggtgagttattgggcctaggatcaaatcgcctgattctgaatcactttcctctttttactctactatacttgtcttggaaactgagacccataatgtcatggcctgggtcaccatgtgcagagaastatcataggctatgcccaaactcaagtcayttaagcctctgatttccctccggagagcagcttctctgtgactgaggcagccacagcacctgtggcccagggctaggcctctcctcgggcaaggcaagaaaggcctgacttggccagagcaggagggtcagactgggtcccacaaagccagctgagggaagtcatctagcttgaagacataatcaatcccttttcccaacaagatgaaacctacagaatggtaaggatggaaggggtcttggaaatcatctggtcctggttttcccaaaccttcttctttgtaccagctggcatctttttgaaatgcagcttcctgggcccggcacagtggctcacacctgtaatcccagcactttgggagaccgaggcgggtggatcacgaggtcaggaattcgagaccagcctgaccaacagtgtgaaatcccgtctctactaaaaatacaaaaactagccaggcgtggtggcgcgcacctataatccaagctactcaggaggctgaggtaggagaatcgcttgaacctgggaggtggagcttgcagtgagccgagatcacatcattgctctccagcctgggtgacggagcgaaactctgtctcagaaaaaaaaaaaaaaaaaaaaaaaaaaagaaatgcagcttcctggctctcaccctactcttgttttctcattttctgtagggctgggcctgagagtctgtattgtaaaccatccttatatcaggctctgatagtcgatgtgagaaccttttctctcatccagcatttgcagtagtattgtgcagcccttcagggggccacatagttcaaggtcacctcggaagttaggaagagttcagacttgccagggcctctaattctaattcatgtatgtttcccagggcagtggactgcactgtgttctgagcctctgggccacgcccccaggcagactcccctccccgcagcaggccagagccattcttgtagttctcaagtgcattggggtagacattggttaagcccctcgtgccagccaactgcagtgtagctttacctggtgcacctgctggggagctgggagtttccaccacaggcttcccagataggatttctgtcagcggctttgacagaatgcctctgtccacacagcctcccccaccccaagcagcaggtaatggctgacacttaaatcaggcaacttttaaacttaacaccactgagaggccttgagttggggaccagaggttgctcctaaaggcagggagcaggttgaaggagcctccgctctctctgagcagcctgtgctgtgccccacggctggtcacggctctgcaagaacccacccagagtgattcagaacaacaggtggagtcagcgctcgataggaaaactagatacctgcttggctccaggccctggagcggaatgtgtccacgtactgggcgctcattcgcttgccttcctcagcacacggtttaccctccctgagccaaggcagaggagaacccaggccctccatcagcagctttgcctgctgccatccaccgtttgctcttctcctagtcaggctgcacccgtttctggaagccaactgcagtctcttctatggagacagcaggcagacctggtcatctcacacacaccctctcatctgacccacacaccaccccagaagggagggtgaggacaacagtgttcctcccatttaacagattaggcctctgaggctgggagaagaggagtggctttctccaactcatatggctggtgctgctaataagaaaagccaacattactgagtgtttattctgtgtcaaacgctgtactgaatgctttttgttgcctctcttcgacttcacagcaaccttatgttgttgttactgttattcccctcccttcacagatgtcagagatatttgataactcgcctgctgagggataggattgaacccaggtcatatgacttcaaagtgcacacacttaaccaccgtactggtctgcacccttctgtctcctaatccagtgctctttgccttttccttgctgccctgtcagagaaccccagctggggcctcaaacctgtcccagtctgcctcactgtgttgactccagatagcccaagagcaacccaacctgcctcatggtgttgggccgaggccagtcatagcagtgagtgttctggggtcatgcagaggcagccctcaacgatagaatagacaggcccatttttaaatccatcaaaagacctccaaggctccccacccactagcctgccctgacaggaaacaggttgttaagagtctcaaatgtcaggccgtggtgctgttttgcacaattgccataggccagcgctcatttaccctgccttccagcttccctccctctgccttttaagcatagatatgttgcytagagcttgggctgtttctggaaaacagagttgttttgggagttaaatgagcttatttaagtcaagcagttagaacagcacttgacactagataagggctttggaagtgtttgctattatagctgtactttctactctttcttttcttttctttttttcttttttttttctttttttttttttagatggagtttcactcttgttgcccaggctggattgcaacggtgcgatctcggttcacagcaacctccgcctcccgggttcaagtgattctcctgcctcagcctcccgagtagctgggattacaggcatgtgccaccacacccagctaattttttgtattttaattagagacggggtttctccatgttggtcaggctggtctcaactcccgacctcaggtgatccacccacctcggcctcccaagtgctgggattacaggtgtgagacaccacgctcggcctgtactttctacattttctacaggagacatgtattacttgcaagctaacataatgaggtacttagcataagttctgtagccccagtggggatctctgaaccaggaaaagggtaacccccacagctgggcacagatgccaggagagggatgattgaggcatgtccgctcctctcctctccatctaggtccctactaacatgccccttcctccacttcccctcttctttccacagaaatatttgtcccagctggccgaggagggcctcaaggagaccgagggggcagatagcccgaggccagaggacagcggaatcgtgccacgcttcsaaaggaaaaagctctgatgcttctgcttctgctgctactgctgctgctgcaaggttggaaaggagagcttgctgaagtggggccttcctgattctggggacaggactaaagcctgagaggaaggaaaaccaagcagggcacattgcttgggcttgttcccagagactcagtgaaatgcccctgatatgtctccaggagcaagtcacccaggtgtgtccagcccactgagggtcaccaactctctccctgctgactcttgtttctctcaatctttcaattcgtttttctctcttttcctcttgttctttctctccctccctccttatgtgccaaggatcgtttccttttcacaaaacccaacttctcagggattttcacagtgtttaaattcttggtaggatataacaggtcaggcctagctgagtcaggcaaggaaaaggtttaatggaaactcctgggtcaggcgaacccctgcagtgagtctacagcagtatctctgcctggtgtcccatgtatcccctgcatgaggagctgagtcaggtctgcagtcctggtgaggggacatcacggacaatctgttggcagagctgggagggtcttcattaacctcttcctccaactgggccacccttttgaaaagcccctgtttttaataactgtttcatcctctcagttattctagaaatctgccagacttatgccttaaagtaaaattaaatgaattttagagaagatgaaaagagcccttcattttggaagctctgataagtttcctccaaacttattcccctcctcttgatttcaggagatgtcagggtttttctattctggacaatgaatttggtacagaktcactgtaattaaatataaaaacagaagcatcttcctccagctaaagcagcagttggcgcgggcttaggttgaatgctggcctctctgcaaagcacagctttggctcgagaggcacagctccaggctgtggaaaacagagttgtcttgggggttaaatgagcttatttaagtcaaggaaacatcatctgtccttgattcagccttggtgcctgcactctggggtacaaccacctcacagtaggatggtttttaaatggccccccagttgrgggagaagctaaggaaagagaaggctgcagatccaaagagtggcattgaagtttgctgggtgtctgtaggtggaccctttccagctgggcagatagttgagggctccctgggtttgactgtatgtgcagactttgataccaaaatgttatgaaaagtcgtgattcccgctgctctttctggtactggagggtgggtaccttcaggctgtggggtctctagcctgatattccattgaaagggtgtgggataaaggtgctgggggaaatgaggctctgccacagccatagagaggccctcgggcagttaagaagggagcctggagctgttttcatgagcagagatactctcctgaaagcacccttcatagcttagcccaggaaaaataaaacaaggaagacaggtcactctcccctaggcagttcctgttgtttctgttcctgaccttgggcaggcagactgagaagggactgtgtagggttttgttttgttttttttcattttcctttttatggcatgtgagagcatactgtacattctgtcctctgtactaatggaggaagggcagagagattagttcaaggctaacattttatatcaggtaactgaggcacacaaagggaacaaatgaagaacataaaatgatcagtgtaaacctgaaagcacgcagtcattggcaagggacaggctcatgggagctggtgagagagagcagttaaggcaagcaccaggggaaagcagaccaacttgaacagatgtgatgcggagaggttggaagaagcaagaaacctgaactcatcatcaggctattaaataaaatttataggaggctgttggtttggactgagctcctgcaataggcccaacagaccaaaacaaaagggagtcactcatgttgaagttctgtcttccaggaaatcaggagagagagagagagaaagaatagccaaatccccaaacaggccagttttaaccagcatgatgaagtgtccttggttttaacctttataaggaaagcagctttgagatgaccagtctggtttttgttctttgtgtctgctttcctcagcccttttctgtctataaagccaacctcctccgctcagctcatgggaacactcattctattttatagaatgacatgttgcccaattctagaatcaaaaataaaggccaactaagatcttcaaagtaaatttgttgtaattttatcttttgagaagaccatatgggggctgctgaaaagttggtatctcaaataaagtctgaagatcacggctcagcccagattgttcccctggccaactccacaggtttgaacctggcattctggacaccagctatgcctcctccatttctcagaaaacctttgatcttgtgtgtctttcttcctactgaagggaattgtgggggcagttctttggccttcttgctgaactttgctggaaatagcccacaatttttatcagaggttagaactgtacattatcagagagactggacactttatcccctagcaaagtgggagaagattttaccagctcattccactccaccctggccttcccccaccccccatccccagcagcatttccatggaaatccagatggtcgtgtagtgttatggctctcttgtgatagactggccttcatattggagagctagggagagcccctgggagggagagagataaggcgctatctgccttcaatcagaaccttcggtttaaaatcatctaagagtctatacttgtgtgtacatacgtatttatttttatttatttttatacaattccattggcatggtccttcaccgaccctatgatttgcactttttatttctatgtgtgccacacacaatgcagtattaatggcaaccaggtaaatattgatttatttttwaaagcttttcttcagtgttttgtcaaccatttcaaagtgtctcccaaaaaaggatgctgaagagcaattgctcccttaagcaacagattcatatttaccctgggttaatacaacaaaaggcctgtataattgtcttttcattgttaacacccaaaatagcatctatctagacagtatccccaaagaatttggaaaatctgatggtgtgagcagcagccgttagtatcagggtttcccattcttggacagtccgaggctgtgacctgttagataattagattatacttgaactggaccagagtttgttttttgaatttatgagaaaaaccaaaacactaagttaagtttgaacttgtaaagtattgaaatttgttgagtgtcctataaattgtcactacttttcctgatctgtataactgactgcaaagtgtttgtttttacaaaagagaaaagaaaagatttttaataaagagaatttgaaagctgtgagtgagtgactctgtgtcatgcaggggtccctgacatttggctggggaaggctcatcaagcagaaaggttgagatttggtccctttgaattgtgaattattttcaagggttgaacagagaggacaaaacaggttttcttagggctccagttaggctaccagagagaatcagagattctcaggggtgatcctcgggggatgagtctgactaagtgggggctgctgtccttttggaggctcagatacgaacatttcttggcctcttataaactcctagctttgccacccagcgtcctgcaccagggttaggccatttctgtaagttccattccctgtgaagatgaatatctggtggtcagtgctgtagtggaaatagcaggcacaggcagaggtctggccctgcccctgttagcccatgacttcctaaggccygcttccttgggtgtaaaagaagataagagtattacttgctccgggtgtggtggctcatgcctgtaatcccagcactttgggaggccaaggtgggtggatcacaaggtcaggagatcgagaccatcctggccaacacggtgaaaccctgtctctattaaaaatacaaaaattagctgggcgtggtggtgcgcacctgtagtcccagctactcaggaggctgaggcaggagaatcgcttgaacccaggaggcggaggttgcagtgagccgagattgcaccaccgcactccagtctgggtgacagagcaagactcagtctcaaaaaaaaaaaaaaaaaaaaaaaatgaatcgcctcccagggttgcttcagggttaagataattgctggtggaagcacttggtgtgctgcaagtcaccgaatcttgtttgtttttgcaatctggacagcagccctccaaatttcaggggttcttaagttgtttctcaaccatttcttctagcaaaacaatgccagtcttctaggcccagttggccagtcctttgaatggcccggaaccttctctgggcccttcccttttgttggcagtgctcctgagtcaacagggaggggctgggcagcctggacccagagggcaaagtgagggggccgcctgcaattcctgggaacagattgcaggtctgaggaaagttcctgctgagcctgttgctgtctgcgccccacccccacctcctgtggccatggtggaccaagctcaggcctccagtttccaaccaggaggagtagggaaacctccttttctgcaactgctatctatgccccagatggccaaagcagtgaatgggcctagactggttctgctgccctaagtacaggatccaggatgcttgggggtgcccctggtgcctagtcctagcatgttgttctatgtggcacaactctagagagggcatccacattgtatcctataggatggcaccccctggagttgtgcaatgcagacacccagccagggacacccccttccctcgagttgcagttgttcccccaagcctgggtgttcccatttgctctctgatatctctgtgggccctagagcctggttctgagccagtccaccaggctggacctctgacactcagacctactccctgtaccacacctatccccagggatcaactccagactgcccctgcctgactctgccacagcctagacactgggattcctcctcataatgccctactaggtcagggcacttggatactaaccttgctttcttttctttgtttgtttgtttgagacaggctctcactctatcacccaggctggagggcagtggcacgcgatctcagcttgctatagcctctatttcctggatccaagccatcctcctgcttcagcctcccaaatagctgggactacaggcatgtgccaccacctctggctaacttttttttgtagagatagggtttcactatgttgcccaggctagtttcaaactcctgggctcaagcaatccacccacctcagcctcccaaaatgttgggattacaggcatgaaccatcaaacctggcaacagcaactgttaactgccctcttaggcagtggttggacatctgggctcaaccctgtcaactccccattctcttttcccacaatggcagtcatataaaggtgcctatcctgagtgaaattccaagcatgttggagcaggatggccccagagacccccaagcctctgctcttccttttacaagccagaaaacaggcccagagaagagaggtgacttgtttgaggcaacacagcttattggtatagggccaagactagaatccagatcccttgagtcttgctggggctacttggagagtttatgatatttcgattacattatcgtgtgaattttccaggtctggtcctagctggactttggcactcagcaagggactcaagagaaatcatggattctcatgctttgggtgcatcagccgcacctggtgagcttgctaaaaatgcatattcctggcgcccccatggagattctgactcattaggtcacggggaggacccaggcatttgcatcttagcaagcctggggggtaattcaatgcaggtgcagtccaccgatgacacttagagaaacactgccctagatgtcaaccagggacttccccagtagctcctggaatagaagcagcatttattttactgggtggtagggccattgaaggtaggggcactttagtgtgaaaaaggcttgacagtaggaggcagagaaaaggagaccagcatggccatggcagaaggggctggtggcagctggtgggtgggggaggcggcgaaggatgggggtgggagcgtgtcacagtcatcgaactgggtttgggagcatgtgttatgatttttagttgggttcgtacttactgtgctcaggcaaaagtcaattttccaatgctgtctttatctttgttaatggctggaagtgttgtggttattaaacagctcctcgagatctgatggaagccctgctgctgaagacagagagctgtgtggagtcagcaatccttactcagaggagaaacaaggaacagggccactgcccagggccacgttgctgtcagcgaggaactctggggtcacacacactttctctccctcttccacaagacactactgctgtcagctcggccctgcwgattcctgagtccccctgcatggcacacttagtgtactccataggggcactgtctcttggcctcttcacaactggagaagcaggtactgttattctccccatttcatagatggaaaatgaggctccgagagacaaagtggtttgtcaagggtcagacgaccagtaagtggcagagttgggattcaaacccaggtccacatgactgtcaaaccacactcttagccactattctccactgcctacctcctgttcctgcctctccctaaagcctctagactctgggtctgcccagagctgcttggataaattagaaagtctaatttagcaatactgcagttacctatgrctgaattcctgattgttaaattccagaaactgatttctccagtacctctcctccctggaaagtaaagaaaggcctccacccacagcactatacccagagaaatactgtttcttccttcttctcacttgggagaatattccaggggagctgagtctgagggcaagagaggaaggagggccccgggggctgctcaagttcctcctgtttcagggaggagaagaaagagaagcagcttgctttctgctctcaggggacttggggacaaaggggagtgatcaaaaggggatttcccacagccccaaaatgctagccggattgcacttgtgrcctctccttcctgagtgaaactagattgttgacttgcctgccacctgtttccaacatggagtagagatgttgcacatacatgatgccatgtgtccagattaagacaacaaaaaattataaacaaggattgaagaaagttggaggcagcaaatatatggtctgtaagggctcatacagcaagagatgtgactagaagcctcctgggagccaaggcagaaagaaaaaaaaaaaaaacatgctctgtccttaggctggagagagcattccaggttatctggggagattgttctacttgactctatattctggaataattctcctgagggacagtacagaggtactgagaggtgttggaaaaatccttagggagctcacagcccaacattggagaagagcatagtgggagcccctctggaggggacactgggatggcttctggtctgtgtgaactggttcctgatgtyggggcaacacctcccagtgtccgaaggcctgatccttgctcacacctgcccagccacctgagagtgagtatgctggctggagttcatgaatttttgtttgggtttattttcaagctctgtttttcaaatttctctgttaagtggctgaacttccaggaaccagtgttcacaggccaaggaggaggccaccatcatctctactacctgagtgccctgccacacccacctgacaatagagagctctagggtggggcccctgctctttggattgttgggggaaataaacctctccagcatttattctttggggttaccccaaacggatgaccacagccaggagggaacaaagcctgactgggaagtgctgattctctctggcagtttgggaacttcccctcaaacctgtctgataaggagcggcctagggaggaggggtgcaaaaggtgtgccccgtttgcccgtgagatctctcaccatcactgtatgcaagcctaggaagaacagagctttctggctcagggacagatctccatgctgggaatcaggrccttgagttcctgggtcaaatccacaatgaactcattctgagatgtaggcaaatgtttaccttctgttgcttcggttttcccatctgtgcatttgatgtgtgccttgtgcgtgccagaggtttttgggaagaaaataagagtggagacttgctgtcaatcacaaggtggggggtggtcacttctctacctgaatctcccacatgggcctgtggggagctatggtccttattaccatcctcctgcccccagcaggggagcctacccatgaggcaggcttgcttggggtcggccagcctggtctctgtggtttttgtctcctgggctcctcgtatggcttagcttggccctccaccgaccctacttaatcttgcctcctctccacccaccttctcacccccacagcctccatttgtggttcagctatgctcagtgcctcgggggttcccaaataggccccttccagctccttgattttgtaaatggttttcccactgctaggaataccttttggccctttctgtctacctggaaactacgactttttttttttaacattctacttaggtgttgtcttctttacgaagccttccttgacttctctgacctccctgcaggtattgctggtcccccactgtgtcccagaacactttgtacccctagcccagacacacacacaaaggcccctcttttttttttttcttttttttttgaggcggagtctcactctgtcacccaggctggagtgcagtggtgccatcttggctcactgcaagctccgcctcccgggttcacgccattctcctgcctcagcctcccgagtagctgggaccacaggtgcccgccaccacgcctggctaattttttgtatttttagtagagacggggtttcaccattttagccaggatggtctcgatctcctgatctcgtgatctgccagccttggcctcccaagaggcccctcttttatagcccttatcatgtttccttgttatctgtttatagatttgcctctgcagtagtcattgagtctccaaggtcaagaagtgtatcctgcttcccctgtgcacactggtatccccactacagagcagataccagtgaatgttagttgaaggactaagttatctgttgctcacttctgggacttgctggagcaacagagacctgagtcctaagtctctgcccagtcacacactgcccaggtaccaacccatggtacctctgcccaagtaccatgaggactggcacagctggctggctctaggagcagggtgggtccttggagcagtgccagggagcaccctacccgcccaccaccttccctccccctacccatccttcccttccctggtccccctaccccagggctggcagttggctctgaaagtggataacacagccctgcttatgttgcccaaagcttggccttttaacagctggcttcttctatagccacagagccagggctcctgtgtaggctgcatctctgtgtccccaggggcatctcctccccaaacctgtctgtcctcactctgcacctccacctagccaggcccacccagttctctaggaccttcccaggcagagctgagaacaaagcagggtttatgacagttctgtcaacactgggtagatggccttggttcaccctgcactttgcaaaccacgcctgcctgactgcctgcctgatgcccacacctattcaatgcctccaaagacccaagggctgcagggaggctcctggcaccttcctctcttcatgtctaaaaagcactgggagacttgggtcactgagtgggaatttcacagccctggaagagagagaccttggtctagattgattaggccagccagatgattaataattaaacttgacctgttcccagacacacacataccctgcagccaggaattaccagagagtaggggctgagaaggaggctttgaagcttggcatgggaccagctctgaaagcccccagggaactaggcctcttagtctcaggggttcctccccacctatcccaggtctacaaatccacctcctaataaaaccttactgactttttccacaggctctgagctcagagcaggcctttggcaatccctagggtgcaggcagccttggcagctctgctctggggtgggatttgcaaagcagtttggacttcagctgcacctgtgttgacacacgatttcttcctgagctcctcctgagcacagyctctccccttatttatattcccattgctgagcacccagcaaagggcatggcacactcagcatacccaggactggcttcttgcatgatcctgtcacagcaacagcgttcagctcagagaggtgggaactggccagtcagggtgcagcccacccacatcagcaagagcctcctgagctctcccaggggtcttctccaaccatgagaacactgagactccacagctggctgctggacactataggggccaaggacccaaacactagggtgcagctgggtggccaaagtggggctcccttcctccctctctctgtagactcatcctcccagcttttcccttgtttttcctaaggtcctggggaagcatgatcttctccccgtaggctgccttcctgctgccccttcctccttccagctccacatttccccagttatgaggcttcttcatctgggggaggccactcatcagcatgttgtccagccttttgtggctagtttttacttcaggtgtggggataggwgtgtgacttcggcccctctgatgccttggtctcgagccagctaggctaatgcaacccttctgctttgggatgagacaaatcccccaagctctctgcagcccagatttcccacctgagacagcccagccagcccaggaaagccatatgaaccctatgctgcccatcctgcttcttccactgaattgcagggtgacttgattgggtcacttccttttccccctacctcccctcctcacccccaggccttttcctctctggaaatgagaccatcatcctggcccagcctccttccctcctggtgtgacgtagcagagaaagacatcaacctattatttaaacacgtgtgtgcaagtgcctgtgtctgtccacatgtgcatgtgtgcaagtgtgtatgcgtgcatatgaagctccctgagagctgtcacgtttggcagtttcaaatctgagccttcccrggatgccccatcacaggtaacactcccatccatcctggccctgggctgcagccgctctatctgcctgtttcttttggctcctggttcaacaagtattcctgtgggactatgcaaagcctctatctctttcctcatccttgctaaagaaaattttaactgccaagcatttactcctctctctttttcttattaagtagagcagctcaatcagcagggttggggaagagccagaggagcggggctggggagaggcccaccaaggatggttgagatggacttccagagagaagaggaaaaagcgggggaggaagaaagagaacacactctcacactctttctggggaagcagtcagggatgttttgaggtgttttggtggaragtagagagagaatgtgaggcttctgggttaaatctccaaaaaaaggagagatttaacgacatgttgctatgtattgcatatctgatctcactttatgttctttgaaagatccgaataatatttttcatctaagagggcatcaattgtaactctctcatctttattttttgtacaattaagaaagaaaacgacacagtcaattaaactctaacacacatttgttaaatacatcctagtttcaggaatgttaaaatgtaaaaaaaattgtgtgtattaaaatatatggataaagttcttttagattttttaatacacaacatgctgggactggactgcatggggctcttaaacttcttctgctgacagtcgtgcatctgggtcaggtcctctcctcctcaccctgttttcaccctgtagccctcatagcacctactgcatgtgcctgcacataagacaaactcatttaagcagttaaaggttgagcaatcacrtattctcaaggggctgtagtcaagtcctctcctagtcttcatagatttttttttttttcattttaatgacaatctgaaagatgggtagaaaaataggtacatgcagccaggcacagtggctcacaactgtaatcccattcctttgggaggccaaggcaggcagataacttgaggtcaggagtttgagaccagcctggccaacatggtgaaaccccatctctactaaaatacaaaacttagctggtcatggcgatgtgcgcctgtaaacccagctacttgggaggctgaggcaggagaatcacttgaacccaggaggcagaggttgcattgagctgagattgcaccactgcactccagcctgggcaagacagcgaggctccatctcaaaaaaagaaaaaagaaaaataggcatatgcacagaaccayatccacacattcccccatacccataccatagtctggacatctggatggtcaaatgacttgacccctccaccccccacacccacccatgtatgtttaggtttacratagcgttggtgcccatagtgtattgattgctctgattatcccaggctcttgaggagagtattgatggagacttagtacacaaagaacatatttgtgcatgcagaaggcagtgtggtttgcagtggtttaagaaagaaatgtctttagagactggggacagatcagattgcctgaagggaaggaggttttatggcagagcccttaaagacttccatcatctgagggatatgcaaagagcctgagaagcagcggccagagaattaggaggaaatctgggaaaagtatggcatcgaggacatctgagaatgagaatatttcaggagtgaagagttttgtttactagagttgaatgctcctgattggttgtattagttcagtgtttcagtaattctgagagtaagtaagtagattcagagtgttaaatggcaaaagtgaaaaagctcagacaggtcaaatcgcatttgagtgagtgccatttttaaactgcaatggctggtgtgacataatgaatttccattgacttatgaatggtctagagaatcattctccatccccagcttctaatatctgaatcccttttgccttgatctatcagccatgcctgaagacccactggattccaattcctgaatcaagtctggctaagatagggaacatataaacagtcataccccaacattgttgatgggagccacagagagaagcacctgcccttgcaaacacacatagtacccaccactgcagacacacacacaacctgaccaaacctgggtctggttgcctcatcctgcctgctgggctaagccagactggctgcaggacatggtgccctcaggggcagggatcctgcctaagaatcttttcatcacctttaatccattctcctgcctggtgctggcctcaggttctcccaggaataggcccagccactagcctaggcactaacttcttttaccctattgaactgatgttttacataagttatttttgcctgtgcaatatcccttccctcttgttcctgcaagaaaaccactgcttattgcgggaacccattccctgtgatttgcatgggcccatctgtcctgtccttcccagagaggtgttcacatgatccaagcctgattaatcagagaacctcatcctcctcatcacagcaattgattcaggatgaggaacrtaatccaaatgggccaatcaaaatgttccctgtgattttgtcagtaccatcaaaaagacacactctaattctgaggttgctagctgtaagtcaatggttctcgaagtgtggtctgcagatccctgcatgaagtcaaaactatttttataaccacattgagattttatktgcctttctcactgtgttgacattcacactgatggggcaaaaacaatggtgggtaaaaccactagcacctttgctgttctgtgggaaaaagtgagaggctaggaggctgagcggtagtcaaatgaacgctgtgctgcccatgctctgccctgtagttacagagatcatgtccactgtcatacagctccagggcaccatgtaatatggtagtctatgagagtggtcccatcagagttgttcagtgcacaacctacatgggtgtgcccagtggtcctgagagctgtgctctccaaactatgttccatgtgactctggtgccacaaaatacaactcacaaaagaatgccacagttaaataagcttgggaaggctgcattctatatacttctctcttgagactctcaatggaaagccacacagaaaggtttcacaatcaagtaacctggttattttattaacccctgttttccccaactatttcaccatgcaatcattttaattcaagaaatatttataatgtaccatggaacactgagctttagcaaatgctcttaaacaccattacaaacttcatgacagcagagactgtcttattttctgcagtgtgcagtatgctcatggcctgatacggtgcctgacacatgagagacccttgaaaaatttgttgaatagattaatgaatccatgaatgattgatgctttcacaagtatctgatctccttagtattctctatatttacaaaaggtgaggtccttgtagtgcattatttatgttattttgccaacactgaactctgtgctgtggtcagttgtcttcccaaaatgatatgtttttcaggatgcagtgagattttatgcatttgattatgttccctccgtgagcggggctgggcaagcacractgtttcccattacccagcctctctgaggccgcccttcttctgtggtttgaggtggagaagcagcacaggcaagcccttcccagcggtttttgtgtggttgacagagacctaatgccagctttggaaaaggaaaggcctttagcagctctgactctgctcagttgggaaataacgaagcccctgggacgtattctctggagttgtcaggctcagacttgtgtttccttctttgagaaggaaggggcaccaagaacaggagtgaaagtgtcttggaaaccccaaggttttagaaaatgcaggacttggaagattgaggccagaaagagagagagcgagagagagaatgagaatactttactctctagtatcctcaagtgcaggggctgacaaactacagcctgaagccaaatccagcccactgtctgtttttgtgctgccctcaagctaagaatcaataaaaaaattaaaagaatattttatgacatatgcgaattatatgaaaatcaaatatgaaatacataaaatctctttacacatcagcattagcagatgaacatttgcaattgattttaatgatagaacactttgagccccaactaaggaaaatgctatttatgaaaaaagaattttaatcttcttattaggagatatgttttatctaaaaactgtattcattattatactttgaacttcactaatacraatatcataggaatttgttttctcttctgctttttaagtacctatatcataacctcgattttgccacttgcctgggaatcccagatttgttttgagacagagtctcactctgttgccaaggttggagtgctgtggtgccatcaggcttattaccctgccaggctcaagcaatcctcccacctcagcctcccaaatagctggactataggtacttgccaccatgcccagctgatttttaatttattttgtaggggcgaggtcttactatgttgcccagatgtactagctgattgcttacagaaaatgtctgccaawccccgctcaagtggattatcttcaatgacttaagctgttttatatggcaggggaaaagggagcctaagtagattcttcctatattcatttagtcaccaggttcttctaggagtcttctatggtcctgagtgtgcaattggtgaacaaagcggacacatggacatggtcactgtcctcagggactttactatccagaggcaggtcactggaaattgatcagcctgcatgtacatgtcgataggatgatgagtcaaagtgaaccctgacagctttggaatttgaagtgtgtcagctggtcagtgagtcacattgcccagggcacggctacctagaagtgctctgtgtgaaacctaccgggaggaaggatcaggtgagtgccatgagaccagcaggggaaaagccaagtccagkaatgtcaaccaggatagggctgctctgtcatattgattcaggcagttggtcagagagttaggcaaaagcagcaccagcacatgaaaaacaaggtggagagcggcatcccagggcaaagctgcctgctaaggccttcttcacattttctgcctagggtagctaatgagaygccttagcctctaagagctcaagactcctgagcacagcaagggtgcagggatggtcctctcaggaggctaagtacttctttgtaactttgtttcatttataactttgtttcatttctttgtttcatttgtagcttcgtttcatttcttcagattagaaatttttytttccttatggctgcagcctttagaggagtccacagtaatcgccttttgtcctctcagaaaatctgtggataagacaacaggcacatcatctttctcacaacttaccactgaggaaacggtacagagaggaagaaaaaaagcatcccagaaaggcaatctagatcrctcagtgactaccgcctagcacctccaggaacagaggcaaaagttgaaagcagggtgtgtccccaggacatccctgcaactcaccctttctcctctgcttccagaaacatccaagcaatgcctctagggctagtcatagacttaatcttgtctgcctgggtccttaagatctcagatagaatcctgtaagctattcttgctaaccctatacctcgggagcagcctagcaatgtgaaatgaacatgggctttggggccgaatgaacctcacccagagcctggttctgctactcagtagctccattatttgaccttggcaatgacaacttctataagcctcagtaaatttacatacaaagcagagagaatactttcaactataaaaaatgcgtgtaaagagaagagtcttcttcctcaccaatccaatacccttcccagacttgtattaataatgctttggttcaaatacctccagattttccctaggcttatactgacacaaatatgtatagatatagatacacatgcatattttcacaagctacatattactgtacatattgatctgacacttgctttgtttctattcaacaatatgtgtatcatttcaagtcaacacagataaaatattgtactattcagtgactgtataatattccctaatatggataaatgataattaacacaacctactgatggatgtttttcttggtttaaatgtttttctattacaaatcttgctgcaatggatgtacaggtttatgaatctgtgttattatttctgtaagacagagtactgaacatggggttgctgggtcaaaaaggacacacatttaacattttagtagattctatgaaatcaccttcctcccaaagttgtgccagtctacacttgcattagcagtgtgtgagagaactccagatatccttgcaagcactctgtactatcaagtttttaattattgcatttccttgacaacagagaacatctttttatgtttatgggccatttgcctttcctctgtgaattctttgtttatatttctttcctatttatctatttggatgtttgagttgttcttacttataggcactttttgtacattaagcataaacatctgtyggcagagagaaaagacactgtgttttgaagctcccaggggtgagtatcagggtctgaagcaggtactgaactgccagaggtctgtgtttgatattaggaatattaatctttcatgttttaagtgttgcaaatattttacctaggtctatcatttttttaaactttgtgctgtctttcatcatgtggaagtttaaaatgtttcaatattcaaatctataatagttttcttcatggcttctgggtttcctgtcttgtgtaagcagtctccccatgctgatgttatstaattattttcctctgtttgcttataatacttttatggctccatatatttataattgcatctttagtatatcagaaatttacatttggaatagatgaagaatttatattctcagcatacaggatgtgtttctgaggttgtcttctctcatcactctaaatgtactgggggggctcatttttgagtaaaagaggtcaatatcaaatatgatcccattattgtactcacttatataaacaattctacaatttgttaatgttgattattaactagaatgttaatactggttatttctatgtgatgggttgcagatattaactttttcatcttatcacctatattttctttttctacataaacaattatgatttgtgtagtgaaatgtatttaaagaaaaaagtgtcaggagggctgctattgtcgatatctcatattgggcagccaccttggtggccttgaaaagcaccagaccgtaagctccttgagggcagccccatgcttcttgggtgcctctccttatcccagggcacagtgagtcccagacagaggtgtgtagctcaatgggttgcatttctctacaagcccacagtgtttaccccgatgtgaagataacagctccactcactgaacaaagacatttcttctgattgcaaattttatttcccaattcccccttttagcgcctcccacagtgggtgtggcatctgtgttgggaaaagttcacactctaaatacaagtgaaggcataatgaatttacgttccaggccaactcatcaacaagcatgtttgttagtatcatttctaagaagtcttcaagaataattcaacaccagccgggcatggtggctcatgcctgtaatcccagcactttgggaggccaaggccagtggataacctgaggtcaggagttcgagaccaaccatggccaatatggtgaaaccctatctctactaaaagtacaacattcgctgggtgtgttggtgcatgcctgtaatcccagctacttgggaggctgaggaaggagaatagtttgaacccgggaggcagaggttgcagtgagccaagatcgcaccactgcactctagcctggacgacaatagcaaaactctgtctcaaaaaaagaaagaaagaagaattccagaccaaagtgactgctcctcactgtcctagtggttaatttgggtagtgttttatacattttcagtacaatagcatctctattatttgatttgatccttggacaaaactctggcatgcagagaacaggtataattgtgtcctccagagcactcgtgaaagagttatgtattttcccatatatgaaatttcaagatattgaaaagtttcccccttaagcaccaaaactttatttactagaaacatttgtaagaaaattttcctaaaataacattcggtaaagccctgccttgttaaacagtagttacagagtacaatcatttgaaatttccttggaaagcctttgtaagcatcaattgtcataccaggctcctaggcagatggctttgtagatactgccacgtgtaaatgcctttgccctagtactaaacggttcccattgctttggaagatcttgcttctgccctacagtttttctttccatttccttgctctctctctgcttttttatgtttctatcagcaatcagtgtgcctatctctagcagctgaacttcctgctcatcaattgtttgtcatctatgataggctcggaagccagaaaaccaagcatattctcaacatgaacaggcaacctacaacatgggagaaaattttcgcaacctactcatctgacaaagggctaatatccagaatctacaatgaactcaaacaaatttacaagaaaaaaacaaacaaccccatcaaaaagtgggcgaaggacatgaacagacacttctcaaaagaagacatttatgtagccaaaaaacacatgaaaaaatgctcatcatcactggccatcagagaaatgcaaatcaaaaccactatgagatatcatctcacaccagttagaatggcaatcattaaaaagtcaggaaacaacaggtgctggagaggatgtggagaaataggaacacttttacactgttggtgggactgtaaactagttcaaccattgtggaagtcagtgtggcgattcctcagggatctagaactagaaataccgtttgacccagccatcccattactgggtatatacccaaatgactataaatcatactgctataaagacacatgcacacgtatgtttattgcggcattattcacaatagcaaagacttggaaccaacccaaatgtccaacaatgatagactggattaagaaaatgtggcacatatacaccatggaatactatgcagccataaaaaatgatgagttcatgtcctttgtagggacatggatgaaattggaagccatcattctcagtatactatcgcaagaacaaaaaaccaaacaccgcatattctcactcataggtgggaattgaacaatgagatcacatggacacaggaaggggaatatcacactctggtctggggactgtggtggggtggggggagggggaagggggaagggatagcattgggagatatacctaatgctagatgacgagttagtgggtgcagcgcaccagcatggcacatgtatacatatgtaactaacctgcacaatgtgcacatgtaccctaaaacttaaagtataaaaaaaaaaaaaaagttaaaaaaaaaaaaaaacaaccaagaaaacacaggctccaggaggagctctaagggatttttatctgagtaaaggggatagactgataagagaggtcatttcttctgctcgttcacaggtcttttgagattttctttgctttcacactgatgtggttttactgcactagctccattttacggatggggacatggatgccaataagacaagatgactcagtcaaggccacatggcaagtgagtgggtgtcttcctccatccatggccctgtcagttttggcttggatgagccaagtggtagaagcgtgactggggcaaagctcaccagcacctctcctggacttttcttcagaagagagggtcagcagtagcccctctgggaggtttaaacaactccatgatacacctggatcccttctgctaatgcagcaggccccttcatttccagaaattagagcttgccaaacagctgtgtttacattcagagccgtagtttatcgctgctggtcctggaagggattgttcaagcttatcttctctagatagcaacgtgctgagggttgcacaattctgacctagattgaaatcagctgcaaaacacctagtcctgaacacacacacgcacacgtctcaggagactcaaggcactgcaactcactgacacattctctcctcaacaggccaactctctcccataatcctgggacctgggccaaggcaaggtggtacggcagcaaaggtcccaggggactttgttgaggcaggactgtttccctgagctgggtgccggcctcctgccccatgtgcctcattctcttgtctttcatgcagggagacagctgggtgagagggcacagagaagaaagacagtaggcatcatgctgcagaagattcagggccagaacaaagggcagccrttgacagctgcacattttatgcaaatcttgaacggtttcatccagggaacaaaacccttgtgaaaatggtggaaaagggccctttcccttttagaaattctacagtctgactactccagatggtagaagactaacaaaaagctccagcccccatggctctgatctgcccactgcctggtcagaaacctttaagagctttcaacagttggccctataaagtccaaactcattcaagactctttatggactggccacatctttagctccctcccagcccagagtcaccctctgcctgctctcaaccttcctggtcttttatctgtacccctccttgtgcacttatcactttccactatgtacaatggttgtttttatgagtcttatcattcctgctggcctagtctatcagttccttaagggcagggcctatgcttgtttatctttgtacgttgaagctttagtatggtatgcattatggggtgcccaataaaatttattgaattaaaccagggactctcccacagggatgaacttaccttgagaaagacatctaaattcctcactgaacccaggagcaggaaggacaccttcaccccagcctgcataggaagtgtttcagatagtaatctcaaggtcatgtggtccaactcttctatttcaggagatgaagagactgagatccaagtgttgggctagggacagtagatgttatgagtttcatctataggtgagggagctgaggctctggcagcagaagtcactttctcttttttttttttttttttttttttttttgtgatggactcttgctctgttgcccaggctggagtgcagtgaaatgatctcagctcactgtaacctctgcctcctagattcaagcaattctcctacctcagcctcctgagtagctgggattacaggcatgtgccaccacgcccagctaatttttgtatttttagtagagacaaggtttcatcatgttggccaggctggtcttgaactcctgacctcatgatccacctgcctcggcctcccaaaatgttgggattacaggcatgaggcaccgcgcccggctagaagccactttcctaatgtcaggaaggtagaaggtggtagatttaaagggatttaaagcagggtctgcctgactcagaagcttattttctgttgtgaaggagcccacctacagcctccgcccctgaacatccagctgccctgctggtttcccagaacaggactctggctggccaagccctggggctggttggacactgaggtaggcagcacctggcttgggtgcatttggagctccatggctggagaagctgtttatgaactctgcccatccaaggcctggcagcacagctaccccagctgggtcttttcacagaaggcctgtcgggcaggtcctagaacatcacacagagcctttgtccagaaggcatggtgttttccagtgagaagtttgcattgcctacactggcaggaggcaagggaagtggagaccaccagccttttgccagcaggagtctgctcccagagggaaaaggggaggagagggagctcaggccaagaaggacccaagtggaaactcgagagggaaatggcctcggcagtatttagggcagtagattgggaactccttaagagctggaattgagttttgtgttgaaacagctcaggctaatttcaaatctcaagcctgccctttactgcttgtgaggccttgggcgatttttttgacctttctgaaccttaatttcctcatttgttgtgtgagggggataatagcagtatcttgctggatgtgatgaggatcagagaccaaggagtacgcaggcacacagcagtcactcaataaatggtggagtccacatacatttttgtaagcattccttctgtttctggatttatgaactgataaaaggccagggctgcagaggacacccaggcaatggtgtcacatgactgttaactgagaaaaggaaacgaaattaccaggagtaaacccacatttagaggaactttggcccagaaacagctgggggtaaggcaatctgtttctagttaggaagcagccaatggaagaactgtgaaattcttcagttgttgctagagctgttgcttcataaatgttctaaacttagcatgtgtatgggggtgtgtgtgtatctatgtggtgtgtatgggggtgtatgtgtgtggtgtatggcatgtatgtatgtgtgtggtgtatggcatgtatgtatatgtgtgtgtgatgtatgtgtattatgtgtatatatatatatgtggtgtacatgcttctctacggtaagattgtggaagccttgtctttctcaccttcaacagtgctcaatagtacaggaaggaaagacacatatttattttagaaatgcttgatcctttagtatatgttttttctataattctcccagtggctctcagacaaggaaagtgaggctcagagaggcttcttgtttaaactcaacctgctggttagtgccagaggtccaccctgggcttagatctgcttgacaacagtaggcattgttggcttgactcctaaaagaagaaggccacaaatgcaaatacagtcggggttttgttctatggtctgctcttcaggcaacttttcttgtggtatgtcacctaggtacctgtgttctgttctggctctcagacttgcaacttcctgcacagcacgttgtcactctggttttatttttgtcagctcttcctctgaaccaggcctcaccccagagaagcagactcagggagggcaggaacagctctggggctattgggcctagcccctgggctgatgtagaagcatcagttctgcctcaggctgggacagctggagtgtcagcctgcgcgttctgcctgggatccagcatggctgcggtccctggagggcttcagcttcccgccattcctgggaggcctctacagatggccacagttcaccttctggcaaattcacagcaaactcaagcatgagctgcaagtgctgaggacagcttattgcagttcattctcctgagtaactccacacacacctagcaaatgacaggtaggcatctgccgggctaaaccaggaagtaaaactctgtgggcagcctcagacaggctcttgtacagaaaatagaaatcttattagttcctttagtctttcaccaaacatttattgacaaccacctgcctacaataagcctgatgcaggggcaaggtttttgcctttcagaaggccacagtccagtggggaactgatgtcaaaacaaacagctgagcttggggagcagcatgataacagataggcatatcatggcaggaatggaggaagagtctcttcactctgccctggcctggggaaaacttctcatgggaagcattactttacctaagcctgaaggatcagttagatttcaataagtaaaaataatatcgaaagctattaaagtattattattatttattagatacttgcaatatgtcaagcatcctactaagtactttacaaacattatttcatttaatttgaataacatccctaattcaacgatactgtaattatccccattttacaggtgaggaaactgaggatcagaaaatgtgaaataactcactcaaaactaggaaatagaagaacaaatagtcaaaccaacttctgcagattccagagcccaggcttttatgctttttaatatgttcaaaaaatataataatataaataggtaaatgtcttgttcccctcctggcatctcctgctggtctctgtatatcccatacacaccaactgcctgctgcccttatagatgtaaacagttacattggttttttatatgttattcagtgtttatgtcaatataaatgagtctgagtaaatattcttatttacccctctttcttattcaaaagtggcatatattaacactgatttgtacttaatgtagtcttggagagctttttattggagtatacagcaatcttcctcattcttttgcacagttgtatagtactccatttgctgagcccaggctttcaaacacaaggcaaagttcagctggaaacatataggtaggctttgctaaactgtctaaatttcatgaggcaccaaggagcaaaggggtaatgatatggatttatttttagaagattccttatattaggtaggaagatgcacacagcacagcctgcctaaacatgtagccccacctcagtacaaagacatgatgtactgccacagtggtggctggagaaaagcccttccatggaacaagttctgacttatctctggccctgttgcctgcagccctgcggcctctgctttttaagatgtcttccccatgatctgcctgtggaaattttacggaacttcctgtgcctaggatgcagaaaccacgtgtagtcttaatgtgtcaccctgggctactkctctgggtgacgcattaagacaacttataataattgtgcaagagctcgagacgcttcacaggtggtacttaaagtattcccaggcctctagtattccctgggaaagcttgctgtcagggctgttactgactcaaatgcctttgaaggtaagctggagtcagcactccttttctctgagagagggggttctcccacagagtaacaatacctgtggtaataactttggttctttgaaaagaggagttttctctttaaggttatgtgatcacagttgctaaaaccttggtggcttcaaagaggttgtgtagtttccaaaaatacagccccatcaaatgcacatggccaccagtcagctgcctttgtgtttgctgagttctatggctatggacctaccacatatattcatcacagtgaataaagctgaccaagctttacagcactggttacattttgttctggtgcctcgacgtttgccttatctttccaaagagttcttaagagaaggtagcttataagtgaaatcattgcaccacacagtctcctggaagaaaacatgcataatcgtgggcaatggctataagcagaatcttagaccagatctcagccaactcacagatcatattggatagattacagccccagaaagaatctgggaaacgttttaagttctacacccttggagccatcaaattactcaaggtcatacttccaattagtagcacaactaggattggaatccaaacctcttgccttctcgtccagatcccagtccattaaatgtgttttccaatatgtattccataagacgttaatagacactatgtacaaaagggtgttatggtcagataagaacagcaaacatggggttaaagaaaattgaat
